United States Patent Application Publication US 2022/0167576 A1 - sequence listing, part 16

SEQ ID NO: 30 - DNA, 35937250 bp, Oryza sativa (residues 31,709,341-33,823,296 of 35,937,250)
  misc_feature (5969519)..(5970518): n is a, c, g, or t
  misc_feature (13681864)..(13682863): n is a, c, g, or t
  misc_feature (13684155)..(13684254): n is a, c, g, or t
  misc_feature (18795366)..(18796365): n is a, c, g, or t
  misc_feature (24815509)..(24816508): n is a, c, g, or t
  misc_feature (35936251)..(35937250): n is a, c, g, or t
atttaatatggtatgactatatgcattagctaaagtctaatgtttgcgttcacaattgtgcagcacatggaggcatggaatatctttgtctactctatacagaaggagcatgctttgccctggttactctctcttggtattcttcttctgtagcttgaagctgtttgatttttatagtttaactggtactccaaggccagcagccagtgtgccaatatacatattgaagttccaaatattcttacgtgggtgatactgtgatagcactttattccaataaaattctatggtttaaatatcggtctccataattttagctcatgttagttcagtttttacaaaacttctttttttttttgtttagtaataataataatattttccctaacaggtagttggggataaagaaggtgcagtttttggcggtttagttgaggctccattgcagccaaccagtgcaaagaaatatcaggttccacctacacattctgaatttctgataccctttttttctggtttaattaccttatgcagattatgatggaatcttaatattgcaggggagcaatagctgctttgttttcactaatttacacagcaatcctagtatatatcgaccgactggtaatatttcacctcctgttttcatgttctttgcataagaacatcaaaagctgcgaaataattttgttccatttgaccctaccttccagactactagatgtatttctctgtgtagcagtgacttatgattgtttttgtcccctgattcctgttcaatatatataacactagcatactcctacaaaaattctgggggatcaagttgctgaatatattactgttaacactagcaaagacttaactcaggagagcccctgagcattcatttctggtattgcaggtgctaataactatttcacagtgtgctccaccgactatttggcattaggaggtggaggtcatttcgcactttatctagatgccgacctgtaatctcccacctcttaagcatgtctttcacgccgtcaaatctgctggttttattgccttttgtcattgatagctctcatcttttcttctgggttaccctttttcaggttgagtggttcaagttccaattcagagacttttaacaacatgtgtttatctcattccccagacttcgcggtaaaagatgtcgaggtatctaattgtgggcttctggctgaatgctatcatgttcatctgggatgcagatatgtaactgctgttttctttgcaatgcagctgtggggtttcgtctatccttccaagtacgatgagacgctcgccctctgccgtactgagaaaccaggaatttgccggtggtgatttggtggtccttgaaggcttgaattgtgctgaatctgcgaatgatgcatctgtacagtttttcgtagacttgagagaattttagtgcacaggatcgtgtaggattgtaggagtgatggaaacttgcgtttctcatgcgagcttgctcagagctgtacatatttgtaattttcttgctactgttagcgaaacatggacgcgctggttatttgtttcagtgttgtcagcttgtcattatatgagaacaatattactggcgaatcaggagataaatgacctgcaatctccccatgcctctacaagaaattgcatgcaaaacatcactagaactcgcaaatcgtgtgaccgttctaggcttctagcgaatcattttaaagcagctgaggcgcagcgataactgttagtgctagctaccattaaccactgtttatagataaaccaactgaagacgattacattacatacggaaaacgtaaatgacatatttatccccttttatcagagttattcgaatcacatgacgcgtgcaaaaggataactgacgcgtgcaaaagtataactgtggctgcgttttataatacgatcactcgatcagacatacgagagggcaccatcgtatttcgcttctcaagtcaagctcaggttttgaaggaacagatggaatttaaagagcttgaatatgttattgaaatattcaataaagcttcagtatttttattcttttccaaagtaacaaagcaagatgacaaacatgtgtaagagttcaccagtataaaaaactgcaggtggctcaacacaagaacaaaagcatctaaggagcaactaatgaatacatcaccgatacagagtcttctgtcaaagctgaatctgggacttggtcaagtggcctgaagtaaaaaaggaaggctacttgaccgcgagaaccttggatgtcaaatggaggtaaatatgataacggagaaagaagctacacaggaatggagcatctgcaacactagttgatatttgcttgctgaaccctgaaaggaacttttaaatgctactcttctgtcatttttttattactgttgttcaccaaagaaaatagatttctgtcttaatgcttatttcctatcacttgaaatatgatgacatgtatagtcttactccaatgtccaacgcagagtcctcaccaccaatcgcatgaagaaccacaggaatttcgctcaagtattgtatcaccagaggcaggacggccggggcaacttgcgctttcactgcttcatcactcagcaaaactgacttggcagtgtcacaaccagcttctgttgctccagattcctcatcttcttcggagaatattgattcagatgggttaaccatcatggcgacttcctcaaatgctctatacttcacctgatttcccctcctttgaggaggcctgttcctgcatgaatcaagcaccaatgttccagtggcttccaaccactcaatagataggccctcaacttcgtcataatgtatcctccgttccatctacacaaaaaagattgatcacatcaaggctaagaagaaaacaacaaaaacaagtgcttccatgaggttaggcatatatataccgctagtttgggcacataaactgacatgaactttggtccaagccccagaactctagcattggcaaccaggacctgcaaaagtaaaaccataagcctttcaaaataaagcttagataaaatcagttgcagaagccaaaaaaatgataccacggtacctctttcctctttatcaaggcccacatgtagagcttctgaccagcatcttctgcacgacgactggcccactttctttcgttgcagtgttcagcaacctctccaagattatcaggggaagggactttaaacttcttagcagcagcagataatgcttcactcccttctttggattcagcagcatccttactaaattggagacctgtaaagcatccgtgcatcatctcacaagatgcggtgttgaatccgttttggcctgtgagagatctcctgtgtttcagatacatcttttcagcctcaattactgcattcagtgttctgtgaacaattatatcaggatatcttcgaagtggtgatgtgaaatgtgtatatagagggacagataacgcatagtgagcccaatcatccctcttgcttatcaggtctgctgtgcaaaagtattctgctgactgcatttgctttgaagcataaaacatgagaatatcaaacaaaacaggatcatcctttaacttttccttcattctagaaagtgaaaggtgaagttgaccagatgatgaaccatccaattcaaaaccattcctagcacaaaatgcctcaaactctctggacttccgtaaattcggttcagggtgcctacgaagtaacgcacaatttgggaatgcattggatataacttctgcagctgacatatttgctagcaacattaactcctcaacaataaaacaagcatcattcctctcatagcgaaagctatcgcatggagctccaccttcatcaaattggatcataagctttgcagtttcaagggacaaagctccacccttaaatctaatctccttcagattctttgagatctcatataagcacctaagggacttgataacatcatcttgttcaaatatgccatgtacttgaagagaagaagcagatttaaacttagttccatcgctacaaatcaaatcctgcacaagatcatatgacagcttgcagcatgaagaaataacagtacgtccaatccaacgattaattatgttcccatgaggatctatgtcccaaatgatcgaaaaggtaagcctgtctaccccaggattaagggagaccagatcttctgaaagtctcaaaggcaacattgatattttgcgtcgtaaggtgtaaacactagtagatcggatctgagcttcagcatccagtgcagtctcaggatgaacaaagtaagaaacatctgcaatatgcaccccaatacgcacaattccccctgaaagcatctcaatagatatggcatcatcaagatcagttgcagtaggggggtctattgtaaaggtcaagacatttctcaaatcttttcttacttcaagttcttcctgaggaattttccagcaaatatcaggaaggcattccatggactcaggagagaattcagcatcagatattgcattttcaaaaagtatagcatccatgtgtgttttgacttgtccacccttccccaacaactgtatgacatgagcacagggatagagactttcctcattccaatcagaaattcgtgcagcgactaattctttagctgcatcaccttcttccaaatggtttctgacactatctggcaaagtactaacattaacaaccatatgagggaatttggaatcagttggcaagagaagaatcagtcctgaaaaataggatgatgctctatggttcatcctctttgaaagcatactcatctgatttttctgctgctctggatcaggacacactgcgaaaggagcaagaaaacctacaacagtgtcacggcgaggagacttcttaataatagctaatacctttccagtgggacgtctgcttgggttagagtataccatagaacagatcctatgcaatgctctagaagcctcagattttccttcacctaagtcctttccacaattttctgggacagtagcatgaccattttcacacgtaacagctttactaaaaccactgttcttgtgacggtaatgcgtcctgtccgaaacaggttggccattgctgcaatttccaaacctgcagttggcatctgtctgacctttcttcccatcatgattcccatttgtttcaccaacttcacgaacagcagaaccctctcctatagcagggttgcacgtaatgtttggtcctttcattctagtccagtaagcaacaggttcaagtgtcatagcaacaagatcaccttcaatctgcaaagtggttcgtacaacattgtatcaaaaaaaataatttaaaaaacattcactatggatacaggaatggtatatgcaatgaaaatgagcagaacaacgaatccatttctaacgaactatatggtcatttctaataaactatatggtaacatggcaagacaagacaaaaaagttttactaggaatctatcacctaaacatttctcctgaatgaattgcttctataaataaggtatcatgttgaatgctgttgtaggattatcacaggtaagatgaatgcatacaacataataaaagttaggggttccaaaagttaaagtgtaccagaagaaaggatggccacgagaagacaagtcagagattttttgcacacggtctcaaactaacgacaaaaatagaggtgcccaatccagtgacatgacagaaacttaaaaaaaagtggcgttgttagatcatgggaaggaaaggtgcaatagtgttgcacatgactttccctgaggctcatatgataccaaatatgacaaacattgcatttcctgattactcatgaggtatctataaacgtggagttagtgtattccaattcctcatatatgtaaccagttagcgagacgtgtgtgtgaccttaacatgaaattcaacgctacatacatgatagactaagagtagcaccctgcatttccaatatccactagtgttctctaaaagagtcactactaattactacacagttagacaacattataacacatacattcaggtagcacaaatgcatgtcaaccagaacttaccgctcggttttgcgccaccccagtaatgagaacatccactggtataccctcaatcgtacagtacgcctacaaaaatcacataaacaacattaccacacaattgcatggaaacagtacaacaagcaatcaaaactacgaagcaagcaatacttgcctcatttcggttgtgtgcattcacacggaacttccccacgaaggcattccctccctgcacgacggacgcaacagcaaagtcaatggaccagctcgcacgaaatttctaccgcaaagttgcaagccaccaaggcggcatcagcggctaaccttgatcgcctcctccacggcctgttcgggccagtgggactggaagaaccgcctcccagcagctcctcgtcccattcccgccacgggcagcgcctccacggggctcggcgtgggcagcaaggggcatgaccggctcgtccccgcggcctcctcctcctccaccgcctcggcatccaacggggcgctcacgtgcatgggcggcatcgatctgcacgacctcggccccgccgccgccgccggctcctcctgctgcgccgcggcctgcttggtcctccgcggcgcgcgtcgccgccgcctcctctccttctcagcggcgtcctccgtcacggcccccggagccggcagctgcggcggcgcggggatggggacggccgcggtgtgctccccggtggccctcatggcgcagcctcactcgtgctgctgggtttggctaagcctcgagaaggaaggggagagagccctgggcggcgggaaccctagatctggaggtggaggaggcgcccgcttcgccgccgataccgacgcggaaaaaaaaaacttgaggcaccggagggcgatgcgaggcgtaggcgaggaggggatagatagaggcagaggaggaggaggaggagggggcaaggaaggaagaaatgggaggggaggaagaggaagaggagggtggttttggaataatttttgttgtggattgcggggaggagtacgtgtacgtggtgtgtggtggcgttcgcgtcgcctcgcgggacgagatggtcggcggcgggtggtggggttaccgctttttttttctctcttttacaatgcgacatcgctctccttgggttgccgggtttgcttctttggctatcaggtggcggcgtacgggcgattaggcctaggccggcggatgagcgctgatctggcctttggattgcttgcgctgtggtagaatgatggatccactgttaggcgcagcgcacgtgagatagcattgaaaatggaaggcatcttttcaatcggaaagaagtcacggagaaggcaatttccgtgttaatgtttttgtgctagtcgatttttatacgactatacgtcgaataatgatgctccatgaaaacaatttttgtcgcacttatttagtcgccacagtcgataatgcgacaatacaaagttgtctatcctgtatttgttttatctttatgatatatttttgagaatatcttcacgatacactgaccttattggtagagaggttatgctgaaatattatatcttactggattgagatcgtctaatctaaaattagagagatgtggctgctaacatatgagtacttgctgaccacgttacaaggacgttaagttagaggacctctctccgatattgtactcgctagtagtaactaataatatgactctcttttaaagatacttttagcttgcttacttaaatgccaaaataagtcttaccgtttgttggtaaagttgaagattggcgatgctagattttgacaaggctaaagacgtaaaggtggtgtttgatttgatacatgtcaaattttggtgtagttttaggagtaaaggcacaaacaaagggatggactagtttagagtcagttttgtcgtatcaaaattttgctagtgtcataaccttggtaaattttggcacattaaaattaatattatataattaaaactagtatggataaaaatcaataacaaatccaacattcattagatactagtaaaagttgccaaagttttagtagagtacaaattggcttccatccaaccaagcctagaaatgaaatggtctacttgggtatcatctttttgtttatactttatgagccaaaatttaaatcttcaacactaaatttggagttgattctgggaaaaaaaaattattgaagtttatttttcagccttgttttttagattgttaagaacacatatatagaaagttttatttataaattatttttcgtttgcaaataacaatgtataaatttgttataccatgtaataataaaaatggaaaaaaaagaaaaaactagaaaactttgcgtggctttgccacgccgttacagtgattggtctagtgttcttagtagagtggcctaaactcaggaatttcgttttaaaaatactctaatatcttgtgttcattaaaatgctctaaaatgttaagtagactgccaatatgattacaacaaatataaccatataagccaatattgaggcacaaaaaataatttcatatgaattgcatatcatttcatagaaattatctgtcagcatataccgccataccaactcgataaaaccacagcccaatcattctcatcctcatccatcgtattcatctgagcaatcctgcgtccattttgggaaaaaaataaatccggtcctggtacagagtgcacgtcatatcgacatagccgttgtatttgtatgcacccctgatacggctcatcatgtagatgcacaatcttttacgccttaatgctcacagtgaatgaacgaacttctcgtagaaaacaaattgagtaaagcagttataacttgatatattgctgtgttcacagagaaagcaacatgaaaaaaaaagagagtaaaatggtagtaggacttaatataccattacgcatttacgctcacagtgaaagatcaaatctctctctctcaaaaaaggagtgcaacagtcagacttgatgcacaatccatatgcttcttgattctgcatacctttctgtcattgtgtattcagcttgttaatttctgctttacatcgttgaagtgtttctggttgctaaataggacaaattttatacttgtagatatacaaatacacttaattgaacttgattaacataattctgtacagagcacagcttaagcaggcaaaggtgaacagagatgtagttaacatgccttggtgctgatgtgtgaaggtgttccagatgcttggtcttctgctaccctcagctgcaccaccctcgtactgtaagtcaagaaaggccaactcttcagatttcagacaaagacaaaacatgttacaatgtgacagttaatttttggcaactcattcattccttggtgccaatctgagcattattcagtagcatcgtgtaacacgcaaaaatcaacgaaaacaacaaaagaaattccttcttttttcttaattacaggtggaattaatcagctgtggtgtgaaactgtgaacccgtagggaagcaggggagggagctcccgctcctgcatgacggcatccggcggcggtagcacggtcctcagccacgccctttgttgcacggccagtggcctccgtccgagatccccttggtgccgcgacttggggagagaggcggtcggcgaatcaaaaggcagaagcgaagacggacgtagcgatgcatgtgatttcctcctccccatccccaagcacggcaaccgaactcatcgccccatccagcgacgaggtggatctatgccaccgccgccgaacttgaggggaaagacggcacagaacggcgcgctggcgcgtgggagggtcagcctagggcgtcggaggggcggaggtggagctggagcgcggggaggaggaagaggcggcgacatcggcgtaggaggacaagtcgacctccgacgaatgaggcggaggaagcgggggcgggggcgccggcggagagaagggcattgcaggtttggtataactttttcaaaaagacccctaaaacctcacatattacaacgaggtccaccgcagctattccacaccgttgatctgtgatctgacggctgcgagagggagacgaaagctggaatcgtgcagcgccacgtggaggggttatttgcacgcgaatccgcgtagatttcgatatttagagatgtgacatgcatattaagcaagtgaaagccgtccgataatgcttgaagattcgtgccccgagtggctaatcaacatgaccagataaacccccttatccacgaaccccgaccggcagagagcgcagacgcgagcgcagcgcaaaagatggcgacgatgtccctcgccgcggcgtcccccctcgcctcgactccccgtgggctcgccgtctccactccccgcacggccttcctcggcctcctgaccggaggggcgtcgctggcgccgttcccgggactggcggcggcggcggcgccgccgcggctgccagcggggaggggcgacgcggccgtggccaggatggcgaagagggagcaggagctggaggagattcgggccatgccgacggagaagatcgaggaggaagtggtggacctgaagggggagctcttcatgctccgcctcaagcgctccgcgcgccaggagttcaaatccagcgagttcggccgcatgcgcaagagggtatgtctcttactccatggggtacagatataccacaactgctaattccattgcgaaagtttagcatttactcctggccaaaatgcgttcaacctacgagtggaaattccaccttctacttccaaatgggtgtggagtggtcgcatgttctgctcagtgtgttctgtttacaaggcccttttgttcaacctctagtactgagttgattatgttcagatatattgagttgatttcaggttcagaatagtggaataacttaccaatttgttggtggaattttgcctgatttttatcagttgcatattggcccatactgaatttacagatgatttgggttaatgcttggacaatttcagtctcagaagcaatttttttttacttaatttgattagaaagtcatgctgacatccatttacgtattcttacatagtatctactttgggtttgtagtattgtttattggattttagtgcatagagtactacatgaagaatgatattgcaatgcaatgtgtatctgaagagcttttatactgttcttgggaaagtagtgttaaattaaccttcagtggaccaaaatttaaaatggaacaaaactttgttctgaggacgtcaaaatgcagatagtacacaagaactaattctacggtcagttatgtgataccttgttcttcttgagggcttctgataagtcaattgttatgaattatcacttgctttggagttcaggtctccacctctgctcagggacagcacaggacaaatagttagcagcagagtaatgcatacttatatctgcctcgatcaatgcttcttgccttttaggaggaggatatcagatttttttttcctgttgtttttctcaccctgctcatcttgcttcaatagcagctttctactatctaaatttagcattgacttgggttgtcatcttcgcatcagattgctcgtatgctgactgtcaaaagagaacgggaaattgaacaaggaatcaacaagagattgtctaggaagcttgacaggaaatggaagcaaagcatcgtggttagaccaccaccatctctaagggagaacaaggaggaatagagagccacaaaagcagacagtctgtagaagtcatttcatgcatgtcttgaaggaaggtttctttctccctgtggtttcattccttataatggattgatatgtaattcacattaactgatttccaagtccttgctgtcaaaaccaaaagttctattaccaattccatttgtgtaaatttcagtttattcaaaatgtgttgtccatatatgcacttatattactgatatatgaaactgtgcttaacgagtgtatgctatacacttgttgaaactcaaactgcctattcaaattcacctgtcacaaagttgtgggtacgtacatactataagaggcagatatgcagagttctaaagaagtgtctctggaatacggagtaacaaaaacaagagaattaggccatgtctataatagttcgcttggaattttggtgccctgctttgctccaaactcaagttcactgttttatcaaacgtttcaaaactgtacaactgtctccaagcccacgttcttgtggcttgttgtgtcggtcacctagatttatgttattgttcaacactgatttatgcttaaactagctctgttagactgtcctaaagcatgttgggctttccccttctactctagctttagagtatgctgcaggtatctctgcacagagctagggagccatcctagatccatcatcagtttcataagcaagcccaggtggcttggcccttcagccaaaacttgttattctgatctcttcaacagatcttaacttgagatgtagagaggcttcactcacaaggtaatcttttagtcaactattgtcttcctctttttttagctaattgtttagtgagcagagtactgagttggtgattgtttgaagataaatgccaacaagtggaaatagcatccatgcaattcttttgttgaaagtctcaagtcatcaaggtcgaagtgatgttgctgataatttggttgggtagataagaaatgaaatgaagaggatatcagccccagttaattgcagcaattttatttcaaacgccatgccttgtctttgttatgccttttggcactgagccgctgactctctcactgacaggtgtggttcaggcccaatgccactgagagaagctaatggcaaaatcttaactgcaacttgaatctatagcaagaacaagatttccactagttcagtttgtccagtgtttttcatgccttgaatagggtggtgcattcaattacccaaattagatttgtttcgcacggactagttgtggtttaaaatcttcaggatgaatttcattttgtattctatgatctacacactgtccatcgtatcgcatataattcatttagttttagtgatactgcatggtcaaagtagggcacgttaagagctggtcgatttttaaatgaataacatactagaaagctccattacctgctggctggtacaaatgaaatgctatcttttttcgtcaagtgtaacacaaagaagcaaaattttgttggtgcttacttcctagagagcactctgggactctggatcctagtaacagaaatgcccaatgctgttgaaagttgctaaagccatgcaaaactctactggttagcattagtttttagtcattttcctgttatatatttgatagcgtgcccccagattcccaaccaacaaaatgcaggtaaactaagaaattgcttctatcacaatacattcaaatgacattacagtttaaaacagtaatacttgatggtaatcagcaaagattactatgaacaaaaccatttgcatgtaaagatatatcttgtgattaaattcacaagagaggtgatattttatcaagcatgaaggttgtatgaagacttactcagctggactgcttcaaatatatattgaagcattgtgcgccctgactaggatggatagactacttgtcttctattcaacttcttttttccagaattgcttgtatcacacaggattaaaatgagacactgttgcaagactactgttacatttagcaattattttatttaatttggtaagaccttgtgataactccattaaaaaagaagaccttatgataacatcagtaaaggttactattaacaaaaccacttgcatttaaaacatgatcttttgattgaactcacaagagaagtgatatttcatcaggcatcgagactgtaggccggattgatcaattatttagctagacctttcaaaatgttctttttatttgaacatgaatttcaaatatctatcgctgttcattattatttattattgcaatagcataaataagtttactgcaatatccaacctatatatgatcgtaaattaggtggtactaccttgcatcctagttccaaatattcttggctgcacactctattcacaccttttatgtataggacgctcaagcagtgatcttacataaacaaatctgaaagtggacacttgtcagtgtcatataaagctgtgctgttattgttggactcaaaattgagttgattaatgttagccgtcaatatcttggaggaaaaggcatcaacccttacctgctcacaagaaagcacggcattttaaaagagaactaatctatgaacagtttaaatgcttgatctacgacaaggacatggtgacaactgattaaggaaaaacactagcagtgtgtccacagagatgatggttcatatgcatgattagtattgttaaatattgacagtgacagcaccacatgttttgaggtgtttggatccttcctatcattgctactctcgccttctgtcgctcttttggctcaacaaattttagtcaacttcctataactgcctgagaagacaagtttcttctccatatctgggactgccaatagtagcgtgaagaaggtttcttttattgtggatcacctcatacccattgcatttcctcaagaaatcatttgcaagttgcatagagcgcacacgcttttgttttgaaaaatatcacaaagcttatctattcctgcttacctgtaatatatcagatacatctaaattcttagagtctgtattctggaacatgatagttcagtgaaaattttttaagttccactgttctggccctcttttgaaaaagaaatgaactctatgggcgcagttgagaatctagaaatagtttttctagatgatttataaatgattattagcgtccatgcaaacatccgttttatatacttgcatactgcaggcatgccgaccattcttatggcattatatcgataccatgtcattaatatttacatgttagtgagcagggttactttccaatcttccagaaagcaattggaaatctgcaaaaacaagaaaacaggaataattcaagcttggaaaatctgtacaagttcagcatatgccgtatatgcttaggaccctgcattacattgatgtctatgaataaccaatgcatatgccaaaaactatatagcactaaaaaaattccaactggaaccatgcactaaagtgaaaatcacactataaagtatgttgcaaaaaaagaagaagaaaaactcttaactagaaaaatcaaactgaagattaacacaaacagttcaaaccagagctaagctcatgcaaaggccagctaaaaagaggaagaaggagatacatagtctctcatcaactcgtcgaataaggcgtcaggcaagagagggaattcagtgatgttgccatcgcagcttggggtgctgtagacatcaccgaggttggagatggtggggtagtcggcgagcggcggaagagagccttccggcagcagcgtcgtcgtcgtcgtcttcgtggcgccattgatgatctccctctcgccagtgcttgcagcgtaatcttggttgtggttggcgtcgttgatgatggcggccgactggtcgaacaacgagctgccatgcatttggatgttaggcaattgtccagcgaggaatgagccttggccaccattgccaaagaagctcgaaggaggcaacggggacaaggccgtggacgacatcggcgaaggcagcggcgacaaggacgacgtcgacatcggcgacaaggccgcggacgacatcgccggcgggctaagcagtcccgcgcccatctgctccatgtcgccgcccggcatggcggcggcggcgccgccgatgcagcctgatctggggctagtcgcggcggacggcggcggaggctggagcagcgcctgcaggtgcaggtactgtccgaacttcgctgcctgggccgcctcggcttgctgcagcccggcggccgcggcggcggggtcgtcccacggcagctggcccacgagctggcggaggttggcgagcgcgatcagctgcggcagcgcggcgaagaagtcggtcctcggccggtgcgtcgtcgggtcgatgcccttctggatcagatccttcttcaggtgtgtgttccagtagttcttgatctcgttgtcagtcctacctgggaggtgcttggcaatggctgaccacctgcaggtttgatcatgacagcaacagcttacttagaaattagaatatcaaacagctagcaggattgagctagctatctagctagcagcagtcagtatcagctagcgtatcactgaactgcatgccaattgccaagcatggtcgattcctgaggattagatgcaaatatgaaccagttgatggatgcaagaaaagcatatttatgctatggatttgatgaggaggtgcagtgcactgcagtacgtacttgttgccaagaacggcgtgaagctggaggatggtatccttctcggcagaggtgaactttcctctcttgatgtctggcctcaggtagttcgtccatcttagcctgcagctcttgccacacctgttcagccctgcaacatgtaaaaaaaaggaaaactcaacgccatggccatcgagctatagctgcatttggatcgatgctagctacaagatcaaagctacgtacgccatccgttgtgcatgtacacatacctgcaagcttaggcagcgctctccagctgccatggccgttcttctggatgtactccatgagcttctcatcttcctccgtggtccaggggcccttcttgaggccgttctcgtcgcagcaaggagacctccccattgctgtgtggtatgatgtgataggagtaggacgaggtaggagatgaagaaggtggcaggtgggaaggagcacaaactagccgcctcccttgaagaggagtagtaggagatgcaggtgggaaggagcacaagcttgccggccgcctccctttaccctgggggcttcctgtttcttagaatgatgcttgccaccagaacactctggattggtctctatataaaggagatcgatatgtgtttcttaattttaaaaatattttggggggagaaagactaatatggccttggctgcgaacataagatcacatgatcatgtgacatgggattgtgaagactcatatatatgaccttggttgtgaatgagcaagaggggtggtgttcatttattgcaacatatatgatggcatgttcactttgattctatttttaaccataccattttttttagcaaaattattaaaaaaatatctacgtttagtttgttgctaaatttggtcaatatataagaaatcatgctaaaaatttggcaatattaccatcttaccaaaactttggcattaccaaaacttggtaaggtttattttggttaaaatctaaagaggccttgagtatctacaaatttactatcgtttctaaatgtatggcgttgtttactattcgactattcatcttaattagtatgtaaatatttacaactaggttgtttcgatcctaggtactgagggtactgagagatatcatgctttctattttctatttatgataccattaattattatctttgcatactaaaaatgtattaaaggcagagtattttgacgatgaaatttactagggttgattgactgccgaggctgtggctgcggcaaccaacgcgaacagtaagcagcgggctgcagcagcgcagccgcagccttgtttgctgaagagccccacagataatagaaaatggtggttgaatggcatgagccaaggttgtattttaagaaaaatgctacagaacggtatcccgttcggacgggatagtacatctaaggtatcgcctgatacctagtaggtattggctaataccccgttcggacgggatgatgcctttgaggtatcgcttgataccaggtaggtatcggctgatacccaggtgtcgcctgtgtcacctgatacggataggtatcggttgatacccatgtatcatgcgatacctctaggtatcatcctatccgaatggataccgtttcgtagcattctcctattttattggacaaatgtgtcaaccttaattctataaccaataattatgtttgtagtataagcatatatgatcatttagctcagatgtgaaaacaaaagggataaaaatatagataatatctagaaatcaatatagacttatgtaaaccgttaataatgctggagaaaaaaagagcttgttctcagtatgctgcatgcatgcgtgttggtatattatttcgaaatttttcaggtaatgagccggtccagccggacctgcactgctgcacatgacagacctgcctatttgtactatgtagtacattgtatttggaaccggtgtaagtgtaactttgtcaaatgacagttgtctaagcgtaagcaatgatctgatctcgaagtcttctcttgcacctccaaagtacttcatgacttgattaggtaggtactgctcagagctactcgtggcatttcttagggcccctttaaatcaaaggatttatataggaattttataggattcaaattctatagaaaattttcctatttggccatttgatttaaatgattgaagctttctaaatcctatgaaatttctatggaatggcacattgcatgtggattttggaggaaatttaacaagagctccaacttcttggaaaatttcctttgagtctgtctctctcatccgattcctgcgtttttcctgcgctccaatcaaacgaccgttcctgtgttttttctgtgttttgcaatcctctgttttacactttagttcctgtcagaatcctgtgtttttcctattcctccgttttttctaccctgcgattcaaaggggcccttaatgtattatattccactgagaactgcactatatattgttgaacatatagttaaaaaggaaaaaaaagaaaaagaaaaagaaacggcaaacaaaactgagaagcgacatggctgagttcgtatgggtagttggggacggcatctccctcatcttcccttagcatatgtttcctaaatagctataaacaacgcaatttgtgaaaaaaaaattgcatataaaagtttctttaaaaaatcaaataaatttattttttaaatctatagcaattaatactcaattaatcatatgtgaatgatttgttcctttttcaagccaccagtagccacagtcgtacagcccagatgaactcaaccttaatttgggaaagatgaaatggatttaaagcttcagaggacatctagcttcactttttgcatatggtttccaactttggataataatagtaaaagtacaaatagattgttgtgttacaaacttacaattgcttacaaatatgtaagatcatacgtactccctccataaaaagaaagctaatctatatggggatgtaacaccacttaggactacatgtgaaaaaaaaccccacaaagctaattatgaaatcgactgcatttttcatagcctatttattaattttgattttccatttgtagattgagtatgttctcacatgaatcaaaaatatattacatgaattagattgacttaaggagtattccttaaattaatggaaaatattctagcctagacttcagagaagctatgatcaattattactgagtttgcaggacaaataattacaaattacagcttgattaaaaccaatagaactgctaagaaaatcaccctaaatacagatatcttcattaatggttattcagattgacttaaggagtacttgaatcaaattaattcacaaatatttgatattcccccctactaattagattaccctaaatcaaattaaactttcacctcaaactcttctgcatgccaattcactacatgaactagaagagttttctttatagagctcacttatgccgacaagaaggggaggaatagcctattgcgttgctacttagctagctacttgccactaagatatatagagactgcactcagagtctctgccgaaaaggtattagtatatggcaactcagtatagtatatttccacttgctgaggcttacttatgattgattaatctggtcgctgaacaacaaatcaaaatcaacatagtgacccagatagtgtgttagattcgctagctcctcgttctaacaactgtacgtacgtggagcaaccaaaatactgcacaatagagtaagatttgttttgtgcatctacatcatatcttttgaattgttgactgtttactttagttttgatcagttttgctaaaaagttataacgttgcattttttttaatattctagtcactcttttagtattgttaaaatctcttatattttgagatggaggcagtatgtgattagtacatctcttttgcatgtaattacgtttctatgtctcctaatatctttttcaagcagataatcatcaattgtttttttttctgattcttgaatatatatagtgtgtattagaaaaaatacagcttgagtagtggacttcacaatgtattttcttaatggaaaaatgtgacacatgatcccttggggttttttcgacattattgctagttgtcgccagtactctagaagcaatagagatgtttctttgtatggagtagaactaccagggttactgaaccccggattatttatttaattctaaatcatttatatcatgttaattagtatatcaaataataattagataattagtatatgttgaatattggtaattctcattccagattcaattcgctaccgttgaaactctgcctgcagggcacatattgtctgaactctatgatctgatctgctccttgtgtcgctgatttagggctctttaaatcacatgaataaaaaaaagaatagaaaaaaacatatgattctaacaaaaaaaatatgaaagcgtaaaacaaatattgcaaaacacaggaaactaaaatattagaatgatagattgattggatcacagaaaaaacacaggaatttaaggaaagataaagactcgaaggattctttctatgaggttttaccccatgttaaatttctttaaaacttgcatgggatgagacattccatagaaatttcataggactccatatggttcattcatttgatttaaagagctatgtaggagaattttctatagaaataagaccatctaaaatttctatgaattttctttgaatcaaacgggttcttactgtttagccaacgccatggaaatccttcttctctccctatggtcgtttccgcgagggagagttgatataccgacgaattctacgtgctccatgggcgcgatcgacgtggggtcggcagcaagcaaagcctatagacgtagcttccccatgcacgcaacgagaaacgttagcatgcatgtcagtcgtcacccagctctaccttcctcctctgtctcggtccatccgggcgataaaacaattccatgatatgtaggtttgatcaacgtaatttccaagctgttgctttcagggtgttgtgagacagctctcactctcagtcactctgtgcttgcagttgcagatctgtatgtcagcttgtatatatcttcaggtccggttaattgtttctgaagataaagtaattagtgtggtacttgcttgtggaatcagattttcatattctccaggcttgagaaattatatatgcattttgtctgatatttgatgacggccttttttggcttctagaaacttctaatagtaagtaggattttgattgtggttagtgcattaacttttgtaggttccctggtatttaaatggagcgaataatcccagtgaagggctcaaggctgtttacccccctggcctccttaatattcaattatttaattttgggtgattttttttaacgaatcgacgagcgccaatttcattgaatagaaaaggagaactttacaaagcgaaaggaaaaaaaaaagaagctaggacctttggtccgagctaactaaaagaaaaccagctattaagacttctcactcctgctaaggcccaagttttggtctcttccttgatcttggctaataaggaagtagctgaaagctccttctgttggaaggttctacgatttctttcgttccatatctcccaggcgaccaacaacatcaaagtgcagagtgccttcttaggtgtcttttgtatgtttgcggtagcatcccaccaatctagcaccgttgaagtttgctgccattggctaggatttagttgcccagactcttcttgtgtatctacattctgcgaggaggtgcagggttgtttcctgggtccggcgacataaggggcagatgtaaccgtttggccaacctcttgtcgccagcctgtcagaggtccagactctgttttggatgattagccaggcgaaggtcttgcacttatgcggcgcccaggctttccagattagcctattgaagttggtggcggtgattccaagaagttgcgcgttatatgccgatgttgttgtgtactcgccgtgggtagtaagcttccatgttatattgtcctcctcgtgctctaccaggtgtatagtctgaacgacgctccaaaccccaacaagttgatcaatcaggtctgtcgtccagcccgtagtccctagcaggtccaagtcaagaagccattggttcgcttgcgaagcctgttaaagcgttatgttccttttttttggaggctgcgtagacaagcggcgcaacatccttcaatctcctcccctgcatccaggccgattcccaaaagcttattttggcaccatttccaatcgttatggttgtggcggccgcaaagaggagtttatcagtatcgtcacatgacatgccagagcccacccaagcttttccgggtgattttcactcgtgccaaagccaacgcagccgtaaggctcttgcggatttctcaagatttaggatgcccaggccttcggaagcagtggggaggtagggtcacgtccaattgattttacatttcccctctcgtcaaagcctctccctccgcccaaaggaattttgggtgatctaattaattaatgccatcgatacgattgactacgatagtttgttttagttatacatattgtgtttctacgtacgtacgtatcacatacgtacatgtgcatatgcatgtcatcgtagactatatacgtggtttggcccttcttaatttctttcaaaaaagtcatttctatttaactagtaacacgtagtttgtcccttcttaatttctttcaaaaagttcatttctatttaactagtacattatgcatgcatgattgctacatagtacatatgcctctactttgtgtaccctgcgcatccaaatacatatgttaacgactaagcagttgttatgggaaattcataatgtagaagataattagtttgttaaatcactattttattgacgtacgtgcgtactaacctaaaacacgtaattggccgggatgcttttcagactaacactatccgtatactaattaaaatgcgtttcagaaaatactccccccgtttcatatatatatatatatatatatatatatatatattactcctataagactatttgatttttttattaccaagtttttagaaaaacatagcaacatttctaacacaaaataaacataccaaactaatttggtgctatatatgctattatattttttaaaacttgatcaagcaaaaaagtttgacttattaaaaaaagcgtcgacttatggaaactgagggagtatatactacttgtaatctagttgaagatgcatttagcagtgtttaacattaatcgagggctaaggaatctgaattctggagctgcaatgcagagagagctagctagctatagctaagaagatgactgatgaaaaggctatatatccatgatacttttgcagcacgcagaaaacaggtagcatatattattcagtgtagccaggattatccagatggtagcagccatatatatgtatgcctctagtaagctcatagaagctaaatattaacagatcttgcatgagtcatgcatggtccaacgcagaacggacagcctcaaattctcaccaactcgtcctcttataggctgcatattttaacagatgatctgctgagatctttgatgatgctgaatcgactactggtagctagatgaattcaaccatatatattgcagtgcttaaaaaaagaagcaaaactaaaagagacagttctaaagatgttcatgcaatgcttgtaattaatcaaatcacaggatcggacactgctgcatgcatatataggaactaggagctaagctaggagcagttagatgagggtagggacctgcagatcaggacagattcctgagttatgttgatacatactgaggatgtctttttcagagtttcagtcttcctcttccagatcctggatttgccagaatttttagcagagaaaattcaaccgcgcaaacttaatctctataagattacttcagtttgttttttcagaatgcaagagagaaacaactcttgatcacaaagaagtagaatgttcaatgtgaatatgtgatacagaacaatagaaaaagcttatcatagacgtttaagaactgggggttcgggttcctaactgtttatgatgatgtttagccacaatggatgtgctaatctgtacgaagtttgcatgtgtgctgctatcttgaatcaatctttgtgacccgaggcatgaatgggtacaccgaccatctaggcagtatgattttgttatctagaattaatgaattaagtactccatttgaccttccgttctctttattttgttataggaagggatcccctcggcctccaactctctattatctagccttaaaaaccgtaaaatgccttgtcaaaaacggtttttaagttgaatgtgatatatctcattgtagatgatcttttttagaagcacaggataaacgtaggggcccataacacatgcacactcattcatagatgattatttttagcaagacaatctatgacaaactaatattagagacaaacttcaagaaccgtctgtgacaaaaaatgttccggagttttcatcatgtataagtgattctagagaactccttcctttttttcatattcaaacttttctaagtttgattaaatttatagaaaaaaattagaaatatctacaacacgaaataattagttacactaaaattaacatttaaatatatttgatagtacatttgttttgtgttaaaaatgctataaatttggtcaaacttaaagaaatttaactaaaaaaagtcaaaacgactataatatgaaacagaggtaatagctagctagacggttactaaattagtatgatcattcattcgcttagtttgcttgctcaaaacgtatcttaagctttgagttactccatcagtttcatattataagttgtttgcctttttcttagccaaacatctttaagtttgatcaaggttatagaaaaatgtaataacattttcaaaacataacaaacatattatcaaaatatatttaatgttaaatctaatgaaactaatttgatatcgtagatgttattcatttttttatataaacttagtcaaacctagagagttttaactaataaaaaaatcaaacaacttataatatgaaatggagggaggacaaagtattacaaatggtaacaatgcatcaatttgtaccgcactggcccacatatatataggccaataaaccttttaatttaatcatgatatcagagcgccaattcttactacacgggcctacatgtggcctatagcacttttttgctaaagtgccttttagaagtaaaggaaagtttaagtggggtgctacgttgtatggcccagtctataaaagcctgggcttttagcatattttgggcttaaaagtaacaaaatatacacttgtttcgtttggttgtagggaagaaaagggtaggtccatgcaaactttgacaaacaagtgatgacacccctctctttgacatatgcagaggagttggtgcatccaacaaccgagaacctccaagtattactaatttgcttccatccggaacatccttttgttgatgacgagctttgcccccttcgacactcttgaagcagtgtgtcctgtcatgtcgtcatcgtcaggacaaagccaaatgcttcggaccaagctcgctttgaggtttaaccacaacagccatgcatccaaaaggccatggaaatgcactagttgatagttagagacacacgtaccaaccttcccttttaataaagctttgagactggtgtctcctatactatttttctcaacgtagtactctcttctctcctttctttttttctgaaaggaactgaacgtacaatgtaggactctgaatagttcttcgtcctctgaccgctggctaagtggctaactgatactagtttagatgtagaggtcgggtattaatccattttctaaaaaaaactgatactagtaaaacaacgtagggcagggagtgtatatttatcaggtatggccgtatggcaagctttctgctgcaagactgtctgaatcatgaaggatacagtagttcagtagtagtattattgacagttaatttaaactaatgattgattagcttactactaaaagaaagtaaacatacaaaaaaatgtaataatatgttgaacattatggtgtagtacatgagacatactcacattcatgtaagtacagggctaggtgcggcagagccagatggaacaattgatggaagaagacaaacacaaagacatagaggattcttggtccctaattttcctcatctcatgtcttgtgccatttgtctcgttcgtactctgtaacaattgcatcatttgtcactcgcaacaagttaagcaatatcataaagttcttgtctttgctctctgaaacgaaaaatgcagcttcttctaccttttcctcctgctccacagaggctgccttccttgcagaaggataaaactaacaccccatgcgagagccattttaataataaaatggatcaaatgctaattgatcagagtagtccacttgcaggtattcccatgtcatcaatctccggtgattggaaggcagatcattaagtccaactaaaagatgttccttatggacttgggtttctaactgtgccataagttatcatttcagtaaatcacatcgcctcagtactgtctgtcgatgcaatctggtcagtgaactgcaggaacagatcacctgttgttttctcctgttcctccagtgaaattatttttattttctgcatcattttttatctttcctttttttttcttttctacaattgtgcattgatgagttataaccaggtctcagacttgtggatatttgaaaccttgtagtatatgttatcaataggtaaactgctgccaaaattttctggatattttactatctgagacttacctgacggcattgacccttgtctcttctgtgaagaacagatacgactaacgcgaattgcacgtggactaactcggtcatccatcagggatcaacgagcacactaaactattgcatacactacaactgtctaatggtataatattgagtgtagggccgctcaaatccaatgctaatttcatccaatctctccttgatggttagtagctcaactccagcctcctcagttggttgtgacttgaacattattcacactgtccagatcaaatggtggagtcctgagcacgaatgcatcacgctaatgacgacgagattgtgacacaaaatgattagaggtacagtgtcctacattgactatcagacaaatcgaacaaggacgaccatgatgtctgcgtcgatgttcttcggtattgctatcttggcgtactggcataactgaaacacagccgtgccatatgcgtctgttctaatattgcagcaaaaatttagcatgaattctgaagctattataatcaattttcagtttaaaaacacagtcttcagttttgatttcgcatgatacttgcaagattttgctcccatttcgtttgcaaaaagcacgcagagcgcaatcacatcctggctgttaaagtgttgctttctgatgccgtaagaaatgcaggtagggctggccatggcacccagggagacgtgtgcctcgccgcgagatggacaggtttcacgtcgccatttttttcccaactgttatgtccaactcttcaggaaagcgattctgcctgctttgctaccggtttcgctagtttaggcatccattccacacaccgcgacagctattttaacagattcaatccctgtcctggctgcaactgcttctttctgagtttctgtagcccacttgctgcaggtgacaatcatcatgaacctaacttattatcagcgctgccgctttctcctgtaattggctgcagctctaaccattttggtcagactacttgtttatcttgcataccatttcattagatatttaagttttcttgtatcctcctattcttggcatatactcttttttgaaacaaattgtttccttaagataaaactgttattaacgcatgctcctttcaaaggcaggaatagtagtaacgtaggaattgaatgttatgctcttataaaactagtgcatttgagtagttcacgggaaataaaacataggaattttagaggaagttttcgttcaggtaagagataaaggagagagggaaaggaagagagtacgtgcattggacttctcaaacaaaaaaagaaacatgagctacgagttcatattttccatatgattttgtaagttgcattccttcaatcaaaaggacactgtaggactagaatactaaggatttgaattctttgcaagtcctaagaaaaaaaatcccccaagccaaaggaggtctcaaaagttcaatgcatgtatgtatgtaactgaattgacccacagtaacgtgccctctttgctttatgtcagtttaactacgagtgttcagccacatttatagttagactggctcttgtggataaagcatttgtgttgcaaatctgaatctgattactacaatgagagatgactaatgctggatcatgaaaagagataaccaagtgtgcactgactattgagtgccacccttcacaatgtcaaagatagttaatctgtcaaagcatccatggttatattggccattaattatctatcacacactgtacttgcattgtactattctagcttgccaatttgttaatgggatctgtaaggacaatactgggatatgatattatgagttagctaggacagaattgtttcttttttcaagtggtcggaattgcactgtcccggcaatttttattctgaataatgtactacaggcgttggggcctgtatagagtgaacagcaggactcgttaagcattgccattttctaattttattttaatcatttcttccctttgacaactgcaatcagatgaactgtcagataggaagaataagtcattgatttgtccccaaacaagacatggaattgtcccccaaaacaaaaagtcctggatttgaggtgaatttaaccatgggccatctgggcctacctgtgcctaccatgaattagttttcaatcgagattgcgacaagaattagtgaggacaattgttattagcatcatgaaacttgtgctgtctttgaacaattgtaacttggcaacttgccatttcggtcttatttttctctcgaatttgataatttgcaaggcgataaacatccagtccatcttgctgcatgatttaaccagcaatttattgggcccacgaggatcatacggccctttatttagcaccagattgagcccatgacaagcccacggattgaacagtctgttcgtcttgtcaaacaagctaatacccaaccaacccgtcactgacgtcgggtcccacacactcgctaggaaacaaaagaagccagagggaaggaggacgaggagaactcgcggaacatttatttcttcttccccactccctctcctcggcttcccttccccgcgatgttttctcgaatactcctctaaaccccacctaaaaccctagctctgctgcctaagcgcgcgcgcctcgccgatggactcctcggcgcgatcgggcggcggaggcaccggcgggtacaccagcactcgcgtgtggatggtcgcgggcgtcgccatcgccggcgccatcgtcttcgtggaggccgcgcggcgcaggcgccggtggctgcgggacaggtccgaggttccccccgatttcggcgccttctgctaccgcttcgagatcgccccggcgccgcagcctccgcctcccgccgcgcgccagctactctcgggcctcacattcgcggccagcgacaagtgagctttcgaggcttgccgctctgcttccgcattccgcgggatcgcgggtttccgatcctggttttgacctgttttttttctcatcgtgttttagcttcgagatcgagggctatgtggctgggtttgggaatccggactggaagaggactcacaaggcagccacgcgcacggcggttcctgtcacgatgctgcagaagcaggggggcacctacgttggtagcacagtcatggatgagctcggatttgggtttgtattttgtacttttagttggttattaagtatgattaattccgttattcctctggttttggtatgactcttactattgtgaactgtttaatgccagattactggcctactggatgccgcagtgtgggtacttgagactctaggatatgccattgataggaaatggaaaggggaaatgacatgaaatgatttaaattagcattattgattggaagggtgttaattcaataaaatgctctgaatttttcgcggaatatctcttctgcactacttggaaacgtaaaaagaaaagtgataaattaagttattctgtgtacaacgggaagtgcagcagggcatacttgtgaggcgtgtttgtttaaatttgttcttcaggaacacacacaacttgctcacattgtttgggggcattcttaataaccttttagttgaattgcttgaaataaattcatcattacagaatgaccccaactcatgtttgtggtaacaggatccaacctttggataatgcaataaagattcctcaggaacaaccaacccctgttcctacagattagataacaaatagcctaaatatcctgcactagacagcagattgttcaaacattctgacgctacaagttaaatgcattgccttgtacttgcttagttgcttaccatgttatcacaatgcctctggtgaaaatttatactgttcctactttgaatacatttgtttatattaactcattcgctattttctgacagtgtttctggaggaaatttacacaatggaacaccaatcaacccagcatctccatcactcttccctggtggatcatgcagtggttctgctgtggcagtttctgcacaacttgtcgactttgctcttggtataatttcaaaagaccgctactgactacctccacttatcatttttcacttatcatgccatggaaaccttcttttttttaaaaaaaaaagcttcatggagacttagtgtgtgatttttcctttttggtatctgttgtagtgctaatattctacaatgaagactatcatgtaaggtttttcctatcttggacatttcaaacttctatttccaagtatattttcgttacaacggaatattgtttaacaccttgttaggatatggcactaacaattatctgcctgtggcatatcatcaagtaatttatccagttttgaactttgtgggtgtggttacaataagatcatcgtgtaacatctaccatatgatggtatattgatggactcaagtgcatacaatagtagtacaatattttttagttagggttacttggtcatgtcctcaactcttatctttgtaattcttgtcaggaaagtttccatctatgtgatgatacataaaaatgttatctgcttgatatcgttagcagaagccctttcatctgtgtgattatcagttcagtcttcagtctgttctttttcatgcattatttttcttgcttctccaaaaatgagtctccatcatgcatgttacaccttaatgattgtttaaccttctatcatttttcccatgtataaatccatgatgcaaactgagtttggttcttatgattttcttgttataatctcccataattttgttcagttattgcctgctcttcctgacctctgaaagcctcgaactcttttaggtactgatacaactggtgatgtaagaattccagcatgcttctgtggtgtactttgtttcaagtcctctcatggggttgtatctactcttgggaccattgcaaactctcaaagtttagacacgattggtattatctctctcatcagtaatttacatatagaaagattttagtactaattgtgacaatcatcttcagtttttttttgtggcacaaattgccatgtgaacttgtgcctgcaggccatgtgagactctttacacaaacaactttttttaagaaaatacattgtggatgttattagattgtgattcactctatacacatatgaagtaatcttttggtaatacaaaaaacaactggagctcttcacaatcacagggaactatcttgccacatatattacatgttaccctacaaagatcatctgagataacgcaaagcagacattatctatttttcaccagactgaaagatgtggtacttcgttacaatcctttccattgtaaaaccataatagacaggaaggtcaaccttcactcagaatgaagagccctttgaccactgccaagtggcaacacatttatttctttattgggaattcatatagactgtttctaatttcacggctttctataccttgttaggatggtttgcacgagatccaagtgttctgcatcgtgttggagatgttcttttaccagctgctacaggtgggcttacgcaaacaaggcagttattttttgctgacgattgctttcagttgctgaaggtccccaacgagaaaacagtaaatgtcatagaaaatgctatccagacattaccaggatgtaagccacactgatgtttcatttacttgaatttgtctgggttagatttgtttattttacacacaaatgtgccgcattcaaatccacatgctgtttgcagatcagccacctaagcacatcaatattggtgagtatatcagttcacatgtacctagcctgaaggatttttgtgaacccactgtggagatgctcgaaggaatgtcagccttgaaagcactctcaacagttatgctgttattacagaggtttgttttcaatgcttccttgctttaatttagaaacgagggagcaatagattgttttgttatgcataatgattcaaacaggtatattgagcaaggaccttgaaggatgaaagtattaattattagaaatttgggttatactgctgatgttttcgtctgttatgccaacgctcaagtgatgattatttgaggaattaattaaattttcctgattcacatgctataagttggggaattttatcagatgattaaattgtagcttatgaattgagctattaactattaggtccttgtaagaatattcataagttttcttgtgaagtctctgatttctgacttgctgattgctttctaccggtgggaagtgggaaatttacacatagatgattgatttgatgtctgacatcaaagcttccattgttgagtgaattatttgttacctttcccacagacagctgacagcacaattggccacttccatgatgctggttttgccttctggtttttttatgattgcatgacttacgatcaatgatttcatggaattatttgtttcattcggtagtacaactttcgcccacttgcttgtagtaaagaacctgagtactgaacactgaaacttatatgtcaattaacttttcagatatgaattcaagacaaaccacgaggattgggttaatactgtaaaacccaagcttgggcttgatacctctactcgtgtgctacaagctgtcaattcgaaaagtgataacatcaaatctttatacattgtacgaaatgaattgcgagctgcactcaagaatcttttaaaggtattcttccacttaattcttcccttagttctggctatttagctactggtagctcattttactgggtcctttcaggaacttaatattacattatagttatgtggttcatatgcaatcattaaaagagtgaattgtgtgttttttggctgaaaacaaaatgtgtaaggacaacttgtttatgcaaaagagaagtgataatacttcctaatacatttaacatagattagattggagagagaagatttaatggagcacattgatgatttagtttggttatatccatttcttcaaaatgataaaatgtgttgcatgggatgccaaactgaccgtgtcaccaataccataagctaagaattcatggaaaattaaaatcaacatgttttgccaaaagaatatcattgcattaaaggatttctttatggagttttctcttaactcattctttcacatcatgccaattaggatactggaattttagttctgccaaccacagctggatatcctttaaagaggaatgcaaggcaaagactttcacctgggtttgaagatagaatgagtgcatttgtaggcattgctacactttcaggctgctgtcaggtagtttaaatagttgctttcaggtatttcctctccctttggctataaaacatggtttgactcttttcacttttgcaggctgtgattcccttaggaagtcacaatgatcatcctatatctctttcattgctagcagcacatggatcagacaaattccttcttcgcaatgtcttgtatatgttttcttccatcaaagaacaagtcgttttggcgtccaagttggtaactgcaccagtaatcaatagagatgctgattttggtgcagcagagttgttgaaagagaaggttttatcttttctttttatgaatgtttaaccctttgtttcttactttctttgctgagtgatggttgtatagggactaaagtttggttgataggacatgagttgcaaattagatcttgtttggcacctctgactactccagaatcctgatgttaaattgaccagtagtcctccaggctaattcaaattggctatattcttaattataagtcttgctaccttttctgaagttatactcttctatcaatcgtagcaacaattgtctatcttaataaaaagatttggataaaatcagtgttttttggtcatgcctaatatttgcacccaagtctaaatggcttattttggaactgtgggaggtgtcatttttttttcttggtatgtgtatcattaatctcgcagaagttatcttatagttgtaggtttgagatgccatcaggttaaagcaattaatttcatgttttgaggcacactttgtcagcatctaatctacttttttaaaaaattccacaatctatgattgaaatttgaactcccttgacagggaaatagtgctttcaaaggacgaaaatggagcaaggcggttgaattttattctgatgctatcaaattgaatggcacaaatgcaacatattacagcaatagagcagctgcctatctggaacttggccggtatacttcctacatccgttccgattgctctaggttcatctgaaattggtacttgctatacctttttaatcctgtgcagttataagcaagctgaagcagattgtgagcaggccttactcttggataaaaaggtaaggcacttcttcttagcttttgaaggcttgctatcgttagcattccttttcttttgttgttcagagtctcgtaggtgcaaattcccatgcttcattttgcatgcatatgatttctttaatgcacatcctaatatattacttcttgaccatgcttttctgcatatgatttattgtagatcatttatgttctggtatgttgaatatccgacctctgtatttgcttatattttatctttttcactgttgataatgtgccccataatctttttcggtactaggttccatatatgtggtatcagaatatcagatggattatctgatcttgagattaaattcctgaaataaatgtattttaggaaaaaaaaagtaacatcttatagcacaagctgtgtacgtttatgtagctttctagaaggggacataaatattttaagatttgtttcatgttcctcgtactctcctaaacataagcattaattttttgttcatcgtagtctaatcatttaaaaattattagtggacaattgaaatagtgttggccaatggtgccaattatttagtaacggagggagtaatcttctatgatttcaacatcaaagtccccactcttttatttttcattgttttttcagaatgttaaagcatatctacgacgagggatcgcaagagaagctgttctgaatcaccaagaagctcttcaaggtgtgacaattttctatcttgacattacattttactagcatattgaaaagaactaaatgaaccactgctaatactctatgggttgccaattatttgcatatggcaatgctggttaaaggttgaagccatctatgtcaatggtggctagttagtctgctaaccctatgcattgaactgtgtttttatgccaaatcactactgttgcaaaatatttcaagggctagaaaagaaagctcattggttgctgcattctattctgagatctttgctcaaaattctctcagttaattaatattaaataagcaatatgccgtggataaaacacaatataattaacatttaaatataggtggataacatcggatgcatccacagaaacagcaatttaggaaaaaaaatcataaaaaccagaatctgctgattgtagttggacaatttccctctgctggatggtcttgtcttgctatctgtacaatactacaatgacatttgcatttacaatgaaatcggatgcctttgctttcatcttctggtaagcagaatatggtgaagatattgttctgctatcagattattatcttcaaatacaagggctatttaggtgagctggtggcttatgtaggttctctacattgaaccttctctcttataggagcaatcattaagctgaagaacaaatcattaagcataagtttaactctggaagaacgaatcttgaaattgagctgattaattttcttcttgttgagggaagagtccagtgtactcattaaatgagttatcaagtactggttgccagaagagcttggtgctatactatgaccccgctttctgtactgaatgtcattaagtatgcttttaagataaggaccttctcagaagagctgacatttatgtttcgcatatttctttgtacagatatcaggcatgctttagctttggagccacagaacaaagcaggccttttggcagagagaaggctgcagaaaaaactaaggtgatacgagcagctgccatctcgtgagtttttgagaggcgcctgattgtacgcaattttgatcgactgaggaagctccttcgctccgtttgttacttgtgttgcccgtgtgaggcattgagcagtttgccgcggtgctgagtcgtcatcagttgatgttctcacgaattcgagaactttggcgtgtttgtataggaattaagccacatattttggccaggcgatgacggaagaaacatttggttagatatattttgtacaaaatcatgtcataatgatatcgtgccttgtatatagtcgagctttttcgcaagttaccggcggcgtcgagccgtcgagcaagcagcccgtatgaagagacttgatcgccccactttggatccgtcgttagggttgaatccgtccagcccatgtgctatattacaggcccgcccagcccatgtgctatattacaggcccgcccagcccatgtgctatattacaggcccgcccagcccatgtaatgttacaggcacgttcgccgtaaccacgtcaggccgcctctcctcagcgcgtgccattgctatacggataagcagcgagcgcgcgcgcttcttccgcctcatataggctgagttcgatagtgtcagttgtcacacagtcacttgttgggtctttgcaattgctttcctcgctggctggctgtaagaatggacacgctgcagcagcgcaggaaccagctccggataccaatggagccgctcgcctccttcgccgcgagcttcttcgcggccctgtcgccgccgtcgccgtcggcggccgcggcggatagctccacggtgctcctcctgccgctccccgtggcggcggcgcgggccctgaccgtgctccgaaggctcctgctcctcgccacgcagtccttcatctccctcttcttcatgttcctcagcgtgctgtccccgccgccgccgccgcctcctccggcgctcgcgccggcgctgccgcgtgctgacccggggtgccccgcgggggccagctgcgtgggccgcgccctcgcgcacgtgctctccgtggcgtcgcggctccccgttgcctcccgcaagtacgagctcgtgcgggggctcgcggagcggctgctggacgacaacgcgcgcggcggcggggcgcggatcggggccgtgaaccgcgccgcgctgtcgggggcgttcgcgcgcacgctgcggcagctggacgcggcggcgggaggggagtggccgggcatggagctggccgtgcgcgcggtgcgaacgggcatgcggtggtggaggccgaccgccgccgcgttggacgatgggttcggcgggcccgcggcggagaagctggccgccgagctgctctggctcgggcagaagatggccgagtgcggcgccgcccgcgaggccgccgcgcagttcggcgccgcgtcgcgtctggggagccgcgcgctcgtcgccgagccgacgctccaggtcgcgttgcttcggcttgctggtacgtacagtacgttatatcacaagactcctatgttttgcgtataacttgcgccaatcaaaacctaattaagacagcgtagactaacgtgccggtgcccgtgtacggctgccgccggcaactgcaaaagaacatacaacatggcgattccgtggtcacgaggtttcatgaactgaataaccttgatactgaattcagtgaattgtgtgatcgttagtgttacctttgacgtctcgatgtgtcattccatctggtgcagtgttcctgttcaagcacgccaactcgagggaattcgagccgagccccggagggaacgaggacaagggcgccatcgccgagcagcgggtctcgctgctgcggtcgtggctgccgctgctctgccgcggcagcaacggcacggacgcgccggtgcttagcagcaaggagaggacggagatggtggccgtgctggatgagctgatcgggaagctggggtgggagcagcaggaggagatcctggcgctctggctgcaccacttcgccgcgtgcccggacaccgattggcccaacctcgagagctgctacacccgctggtacgcagagtcgcgcaggctgctcgagtagaacaccaacactacacgcggaaggagtgcggacgccggtgtgcctccgtctccgtccagccaaatacgtgtatcattgtaagtgttaacgtgtatcgtgtacagcatagcagttagcaaactcagtgtagccgtgcagggtaccacatcattttagccagtgcattcacttgtgcgtatgttcacagcggcagtaatcgtatgacagttatgtattctgcagtttatttactcctgaactctatagtgtaagggtatctgcaaacgaagatacaatcaccttcggcaaacgtgtaaatcatctagtagcaaataaaggcattctatcagtaaaataatggagtgcctacgagttgtacccctcctatgtgtgaatgacatgaatcgctgtgtttcaacagagctttagtggatgaagtcataaagaaggtaaaaaggcctaggattagaagcaaaaccttcacaaattctcttattgtagttcgccagccttgacctcaaattcttctctggttgataatatcttcacacgaaccatacctcgctcccactcggattttccgaccaatatcagcctaccagcatttatcctctcagcatgcttaaataccctggtagaaataaaaagcattacaaatttggataacagccgagtaggtactcccgaaaattcagaaggtataccatttaagacgcttgtcttcaacaaggtctacacttctgccttgcctccgcagagaggaagcaacactacatgctggcccttcaagctcctcatccaatgggaagacaatgtcatctatttggcgtgacagatcaggtaacagacccttttctttcagcagctgcaaggatacaaattatagtgttgacgttagtgcatctgaaaatgcatcataaattcacagcaataaacaaacaatgataaccatttcaccagaatttgctgttgtatcagttgtctacttgtatattaacagtgataaccttttcatgttcttagtaccgccccttttcatgttcttagtaccgcatgggacttactacaatgtagattgtgaattccctgttgctgtcgtcagttgtctacttatatattagcaggtattgtttatgtacttgttaaacatcaaagggataatctaatcttttacaaaccacaaaaggaatgaaaaagaagacatacttccactataacagcgtctccaaatccaaagccgcaagctggtatgtcttcactaccaaatgttgaaagtagtctatcataccttcctccaccacaaattgctctcagttttccatctctatcaaaagcctacatgaatagaacaatagaacttaaaattgaaacaagagttggtaccaagaagagctatggtataggatgcatccaatattcaggttaaaaaatagaattccgaaggcaaaggataaaacatattaaagagaagctttcacaaaggccgatagccgatagctgatgtcactatccttttatctacttgaaagctgatgagagtacggctttcttaaaggaagcataagaacctaaatatcctcttgtcagaagagctaacagtatgaccaacagtaatgatgaagataatgcaattgcagttctcatctaaattagctattgtaacactggcatctatcctgagtactcatagcggataatttgagcagcaacaactaacaaaataataaaatatgatgctaggagcattcgtcatgaggagcaaagcctaacagaaatatgagcacccgtgatgatgctaggaggaagaatctacaacagataatttgagggcaaagaccaacagaactatgcataataatctcaaaaaaatgtatttgggtagctcctacctcctagttgtaactctatgcagttgctatttagagcactgacttgtaaacagaggaaagcattgttggttgaaaatgaaaacctgaaggaactgcaccttttctcaaatgagaaacgtatcttaacataatttgatgaaatctcaaattctttacttgtcacttttgttagtaaccctataaattgttgaataaacaataatatagatatatgtaacataaggtgacgcttcaacaacaacctcaaaaacaattcctgtgtagtatgcaaggccacgaacaacagatgcatcaaaacaaatccaatcagcataaccgtactgctcagcaaacgagaacaacttcttcaagtcagcaacagcttcaacatcagagcctagcacctctgtatgagaacaccaaaattaaagatgaacaatagccacctttctgaaagatgcaatgattatatttttataaatgcaaatgcggatagcattagttgaaatcgccagagtaagagcattttttaaaaataaaaaaagatcccagaatataacgtagctgttgatgattttctttagaaatacaatttttagtttggcacatgatctaaagaaataatcaaacgagcttattcattttgcagcagtccattgattaattatagtccatgaacaaaaacaaacaataaggtcaggaggaaaccttcaagcttgggtagcgacttgagagaaagaacctcaatgatacccagcacagcttcagatgacagcccaattgtaaccaacttcttctcaatttcttctctagtcagctttcccagctgttcaatggtaaactaagtgttagacaaggaaaaaaaaatgccaacatgaagatatcaacaaaacattgcattaatgcaagtattcacctaaggaatttccttcatctaatgctataaaaaagagtatccacgcaaaaggcataaatgatggcctgtggcatattacaattaatgataagactggaattgtataatagattactggtccatttctgggtttcaccagagaggtagacaaggtgcaaaaatttatcatcttacaaacaagcccataaatttcaatgagaaacaagcagggagaaggcccatgtcacagcttctatttgtataagccatgggctgctcaattgagtgatttatccttaactctgtacctggactgaatagctaagaagaaaatatgcagaacttcacttaaatcaagaccgacggtagttaaggggatagaaatgaacttatttcgggcaaacttgatgaatggcaagttgataattatcctagaccatcaggaccttactagagaatttgatgtgaatgacccatagttcattagacaaactttcaggaatgagccaaagaatatacactacattgctaatttccctgctattatttgcagttatatgttatttgatggttgtcaacattcaaacagaagcaagaaaacatcagggtacaaatatcgaatttcacaatgtaaagggtggaaagtcgttagtagaatctgaccatactttatcaacaatcacacaaacttcagtaaacaaatgttctggaatggagtacatattcaacacagcctgaaggacctggagaaaacaaagaatggtcagacatacaaaagaggtgccatgtcaataaacatgtccagactgcagtaacacatgcaaagcagttatcaagtggcagtcactacaccatttgggtcccaatagctcctcatcacataagaaatgaaaaatatatgtaatttatacattctccgtgagcatgtactcatgtagtaacatgatatgcagcacatcagctcacagtaccttacgtttcaatagtgataaatgaaatattgacaccagactggcataggaaagggaaaatagggaaagaaaagtaaaaacataataaccaaatagaaaatattgcaaaagatttttcagaggaaaaaggttagccatatgtacaaaagtgttacctttcggctggacactctgatccccacatctgaagatgtaatcccaagacgttcaaataagagaataatagcttgaagaagctcagactctgcctgatttttattaacaataagtcaattctaaatcaattaaaatcaaacaaggtgctacaatgtagcagagtggcatcttgaatccaaggacaaatatgaatctcacactagaacgaatttactacttactcgaactttaggcatgccaaaaatatccatgttccattgataatgttcacgccgtcttcctcttgtcatacgctcatatcgccagcattgtcctatagtaaaccatttcagtggaagggagactgattttctagacaggagaaaaagtaagcgaaaaatcacatttcaaagaacaaactcataatatggcaaagatgaaacggtcactcaacagaaattaatggaaaatgccacaaacatgaatgtaagtcaagcatgccacaaacaaaccagttgaaaaaggcatacccttgctttataactaggcgtgccaaggaaggggtgatttcaggcctcagaacaacacggcgccctcctttatcctcgaagttataaagctacagaagcaatagtacaaggtttcgtaactaacacttgaataatagatctgcaaacagaactagaacatcggtataagaggaaaaacgaaaagaaagagcacataaacttagattccttctgatctattctaccatgatcaacaagtttataatctactgaaatgtatgccaaggtatgtgcatttctgaaccatgagaagataatttcaattcggtttcacattagagagctagtacactctaagctagtgacactgcactgtaaagggcggcgttggtacctgctgcgtgatctcctctccggccttgcgaatgaagagcgcctcagactcgagcactgggaagtccacctcctcaaacgccatgacgcgggacaccttcagttgcaaacgggaagctagcattagcaactagtcctagcaagcaacccttgatggctccttgagagagatgagaagcgcagctgcggcgttcgcttacctccctgaactggtcgaagagccaggtgcggaggcgcatgtcctccggggggaaatccctggtcccgcgcggcggattcacgtcgacgacggacgcaccgtcggacggctccaccggcgaggagggctcgccattctccaccgtcgacgaggatggggcagaggcgaagagccgctggtggcggcggggtagggaggaggtgcggaaagtggggctagggccgagggggaagcgcgggcggcggcggaggaggaggtggtggcgcagcgacgccgacgcggaggcggccatggattgacgactcgcgaggaggtctcggctcgtctccctgttcgtggataggagataaaacgcagaatcagattgggctatatttgggtagcatttgtggttgcgatccgtattttattgggccaaaatggacctcatattggatcatgatccaaattttgttccgatgactcttgggcttgggctgatttgcgcttcctgtttgacgtcaccttccaaaaattagacctgatggagagatcagaggagagagaggaaaataattaaaaggaaaatggcggcggcggcggcggcggcgggagcgagaaagctcgccggaacactccgcctgctcgccgccggccgcggatccggctgtatccctcgggcgcgggcatctccatgcgagacgagtttccttccccaccggtaaccatctccgacctctccctcccctcccatggactcatccacctgatctgacctctctatctgccgtgtgcattgtggcgtcccgattcagctcctactctgcggcgaaaaccggagaaaatggaggtgccactggtggcgggaagaggtcacggatccggaggatcgtgtcgattggggttatcagcatcgctggcggcgtcgcgcttagcgccctcaacgaccttgctatattccatggatgcagcaggtcatatttctctccctttcttccatcccgccattctttatccgtttatcaagttcgtgcattttttttaaggtgttcctctttagaatcactgatgcttgagcatcagtactatccatgcaacatataaccagtagggcagtaactgtgttgaaggatattatgtcagaagaagtcctgttgtttggttactatgtctgttttgcaactttcttctgattaggatcttagctgcgttcgacatttttttagtttaattggaaactttagactgtagtattacccagcttcttatgagtaactacgttataacaaatctacaataggcagcaaagtctcctgtaggtactaacagaagatagaaacgaagggagatagcaagaaaggaaggtagataatatagccctaatgatttcattaagctctcaagcaaattacacaacttatctcaaacagaggcattatcatggtcaaccaaatgtgcactcagtatgtagtcctcaggactcctccactccaatctctggtacatcttagagctgaggacaactttccttattctgtccacagccaattttcccaggtatcttcacaagaatctaccactgttacatggatactaagagtagtttatacatatgaggggggtagcaagatcttattgttaaaacttaaaaccatgttgtttcgagtatccctcatcatctaacaactagaagcttagcccaaagaatagatattcattattttggctggtcacaattatccaagtgcctcctccacaacagtacaacacaaaccagcataaatgcgccataaagagccctcccagaatctgggacatgatataatgagcagtctcggcaccttcacagagtttgaattttaaagttccctcccagcctctcttgttccctgaattttgccacatatatatctccccagaattaaaactactgcgattaaatatctctacatattatgtgcctggtatattcgggtcttttatatttgccttgtaaaacagatcatgcaagtgaatatcggattgttttttacatcatactacatgagttgtaaattattgatatgaacaccagctctgtttcattttacattgtttatctgtcacctagctctgctaccctaataatgatattatagaggcataggaacataggtttctgttgaggagtgatcctctcgagcgggagatcgtgggatcccccttttgtgagttcggccaggggaaaaggctcgcctctggaagtcacgtactcgccccctaaattatcagctagtatgcgcacaataagattatacaggttcgggccgctgtgaagcgtaacaccctactcctgtttgtatgatgattcttctgtgctcgggaagcctccgaatctcagatgtacaagctagagttagagaagctatctcccctggatcccgagtccgatccccctctccactaggcatggccctccttttatattctaaggggataccaaacatgctgagagatctacctagggagaagggaaaatattctctatattaattacatgtcttgtgccttagcttggaagctaagccacggtttgcctttgagtggggcccagcgccgtcccttgtctgacacgggggacacccctgtcaatctcccattaatggatgaagaattgtggtggccgtcctctgacggggaggatttcgaatgaccctctcgatgggacgggtcataccttcctccactccgccggagatagatgcgacgtgggggcacggctgtctgcccagccagatgtgactggtgacaggccggtcacagaccggtcattcctgtccgccgcgcaccagtcgcgcacgccgcacgtctgcccctaccgcattgaatgcggcatggggcagttgaggcgctgcgttcattaaaggaggctcggcttgggctccctccccgctcgctccccccgccagatggcggacaggcgggggcctcggggcaaaacggcgcgagggcccgaggggcatgacgtggcaccccgaggcctcggggcaaaacgggcatgacatggcaccccgaggccccctgaccgctcctatgacccgcggggtacgggggtagagccatgctgtaggtcatgcgccaggatgggaaggtaaattccccttattccgcataccccgggcccacttcaccgacagtttccttgttaaaattgaaaaaaatatgcatgacttattatcacactatgattcacttcctgttctcttagtatgtgatacctgcaattgtgaatgctttcagtaaggcaattaaaaaggctactgagaaccaagaagttgtagaagcaattggggtgcctatagtaagaggaccatggtatgatgcatctcttgctgtgggtcatcgacgaagatctgtatcatgtacattcccagtgtctgggccacagggctcaggaatttttcaattcaaagctattcggaatggaggttaattcatattcctcaaactacatatatttaatcattcgtgttctttacttctttatgtgtagtttttaagacatccattttcttttaagcaattgaactcaactagttcctatcgaagaaggctctggaaagctcagtacattgtcttttgttctgcagacgatggtgtactctctttcctacggcatcatgactgggacatacttgtcatggaggctcatcttcatgtgccttcagatgatgacaagcagaaaacactcaagataaaccttatagactgtcctgatcatcctagtagagtatccgactgtgagagtattccttgggaacgtcaagaacaggagagttaactatataccaacttgatgtagagttgaagacacctacctttctgccaacactcagaaaaaatagagcagatcggtctcgcatagcgatggctgattcggtgcttggcttccctctctatagcgtgtgtttgggcggttggcacatggttcggggcgtgtgctctggtgcacatccttcctcgacaaccagctgttgatgtaaaacttttcttacagccagctgtcgatgtaaaatttttcttgtaacattttcttcctatcttaattacattgaatgacctccttcggtcattccggcaaaaaaaaaaaagagagcagatgttgatctttgtgatttgtatgtactgatgtgccgaatttgatatggattaagattcatgacaatagggagtgcagacttgtagtgaacaggatttatgtggatatatgttgtcattcgtttttcagcattcgttcgtcagcgagctgcgagtgagccgctgttacgccgagatggttcaggttgagataggctgtggagttagggcgtttttgacagagaaaccagggagttgttcctatgtggaattgtggatgccgggaattggattgtttgctgagaattttttcctcttcttttaaaaaaggaaagtgtttgagttgcaaacagtgtcttgatggttctcttgagactaccctcagtaaacactagcaatctgcatcatattgtactgaatttcttgttttggcatgtgcattacaccacgttagactcccagagtttatctttggattgggtcgtcatatgatttgaaatcaatcaaattatatatttgtttcatgccacgcatggttaagtcttgctggtattcagcatctgtatcctgcaatttgagtattcctttctttgttttgagtatttgacttgatctggaaacatacggtgttgttgaccaagtaacaaaagtgtcttctttcttccttttttttcttttgaagtgtaccaagtaacaaattcgacccagcagatcaacaatttattcccttcctgatcgccttttacgcatcaaacgtctgataccgcgcgcgacacacaagaaatctccatgacagcagtatactttgattcaaatgtcatcaacttgggattgcagagaccatgtacacatttcacacaacaaagatattttgcaacacatactcccaagagtatgaatttaggcaagaggcaaagctataaaccgaagtgaaagtaacaatgggaaatggtaaaagtgattattctaaggatgttacaatatctaacaaagccggttacaacagattcttagtgttcatatcctgatactctactgtacaaatatccctgcggacaaaaaagttgcactttatcttagctcatttgtagagtttgtccttccaatagtgcttggttctccgattgagacggatgctaatgacttggaagcccaagcagtggcattcctggccccttcctgtaaattccctcgcttcgaagggtataacctaaagaatttgtgtcttgcttgttcaaggtaggtgaagaaatattcatgcacacccaccaagtttggaaaaagagtatgcctcctccacgcccgtttggcgaaggaacctatctttggaaagagaagatacagtaacctcaagattacaaatgcagttgccagtgctagataagtatcctgctgaagtattttctccggtgagcgtgcccaccagaatggacaattttcctgttcagcatccttcttaagctcaataccatctactgaatgtagcacggcctctgacgtcattgaaacatcgaaaccttcatcacataaattcaacattagaaaatgacttatagagaaacagagataactaccaaacattttttaaggaaaggaaattctgaagtccaaagaccaggacatgaattttggaacaaaaataccttatatgttcatgtcacacccgagctaagaaaatacaagctcatttaatgatacataacacaactgctcagttgaatcttgaaagtgcaagaaaactaccaaaacgagagagatagagagagacagagtccacactccacatgtaataattggtgcacctgaaacatcacggtagaaagcagccagggacttaacagtccgtggtccatgataccgcactcgcatagttgaattcaagagaaatagtgttggaaaaccatgaatcccatatcttgatattatactgcagttccaaaaatcaagttaacatttcaccaaaagaacatcttacactaagaggcacatttttatttacacagaggcacacataacataccttggcctgattgaggattcttcaaacgcaaaatgccgaatagatgggaacaaagatgctaatatctcaaaatttggcttgcattcttgtgagaatgggcaccaggaagcatagaagagtacagcaatgtaatcatctttgttcatgtgaagaagagtaatggccttcgccaatgttacctcatccccctgcgatgacaaggattaaaagtcagcttggcatttagagctacaatagatataagacggagagaaatagataccataatcactatctaacagttaaaactaatttgagcttgctttgatgcaaaagaacaagaagcgggtcaagctacagatattttatgtgggaaccatagctccaaacatgacaagacaaacaaaataccacccgcagaggaactcgtattgtattttctactaatcaaacaagcaaatggcttccaaggttcatagccggaaaaaaggcttatgaaagcagattggaaccccaacatatagtagacctttggtagtttggctgcttcagaagggatgtgtgtggtacaaacatggaacgaatcatgattatatctccaaagcaagcaaacaaaatctggtataaaattggccttcgcttgttttggcataagcaatatattaatgaatagacgtcagagcaaggtgctaaacactgtaacaatctatcgattcagttacgcccgtagcaaggtgctaaacactgtaacaatctatcgattcagttacgcccgtaatctcaggggctcagaaccaccactggaataggtatgaaccctagaaagcttcctaatctcaggaccccaaatattcgcactttaaacactaaccaatcaatcatttaggcaaataggcagtctaccttgattcgcacaatacgatcatatagcatcgctaaacatggtggaaaccagtatgcatataacaaataaattctgttgttacttatatcacgccatcgcaacagctcacctcgatgacgccgacagggtcgccgcggcgatccagcgtcgtgcatgtgccgccaggcccaaggatttcctccgccgcagtaggcaccgggcacgcctcgggaagcggcgaggcggcggcggtggcggcgatgatggggaggaggagcgccgtccaacacagcagccgcgtcgccatgggggaccgcggggaaaaggaggggatcgctcaatcctagatctgggggggggggcctggagcgcggccgctggatgccttcagcgccgggaggtcacggcggcggcggcggcggcggcggcggccatgggatttgggctgcgatgggcgggccggcgttggggggtggggggtggggttggtacgtgaggcttgcgttgcgggagtccgctttatcgggctggatcaccattcagccgtccgatcacgatcggacggcggatactcctacacgtgccagtctggaccgcggattgcgggcccaccgtgctgcggtaacgaggacgagtgatgaaggattgcggtgcaccctacggagtatgacatgtgggccatcgtggaaagccgccggtggatccacgtgtcagtagcgccgtcattgtcagtcgcgggcgcgggtacgcggtttggaggaggctgtagccttgcccccatctagcatcagtttttcttttccttctctcgagtcaaaatccgaatcagttgatgggtaggcttgacgcagatgagacgttcgctgcatcgatttgctatttgggttttgggtgatttgagtcacggacaagcaggcaccgggaaatctacctatgcaacttgcagggttgcatgttgtgaaggttcttttgcgtctttaggtgccatataagctcacatgatacggtggatgattgatataaagagagagatgagaaaaagagaccaataaattaatagaaaagagataaagtaaaattaatatgatgtattgagataagtgtgttagaggtaatttgttatatatattacctcttaattaatgagttgttgatatggactaggttaagggtgactatcattctcgctataaaacttgcccttgtatctcaaaagaatcgcatgataggctgcctaaaattgattaagctacaggagcatgcggtccccgtcattcagtcccaattgtacaacgttctgaactgattacttgtctccaatgtggtcttgcttattatacaccgataatgccctcttttttttatatatagttgctccaagtggttgggtttttggaatataaccagagcaccagtctgagttgtctgatgtttggattgtggctcgtttcagatttgcaaaattaattctctttgaaaacggagaaaattgaagaaactatagaggaattgaaccaaatcctgtacattacataaattattgtgttctaaagagtctttatttgagtgaggttaagctacaggacgagtaatgaatggggcaatcattttggtctcaggtggcatgtctctgtcacgcgaataagattgtatccgctagcgaataatggaagtatgaatgagtgagagcactcagcagcgttgagcgcattccccaatctgcatttgagggtagcgtcttatttgtgatgcttgttgatatttggtctagcctgttaatctgctccccactaagtactatcagtctgtaagagatatcagcatgccatgatgccaattccgttggattttaggtccattaggatgggatgtcgctgtcatcacgacatatagatgtgtcagctggtaacaataacaaccatgatgaacaagaaattccaccatgcatatagaatcacgggtggctgaaacaacagaatgccaccaattcacaaagatggcttcgtcaacaaattgaaccttacagcatacagagcaccgtgtctgacaaaagtaaaaattccatatacatagagaaatggatatgggaacattcgattggaactctgcaaggatttttttttctttttgtttctcattcatttcgagaataacttatcttgatttcacagggatgacaggtatagataccaacgaatttacagactatcggtatacaaaacaaatgagtaccgttacaaaaagaagaatgtgaggggaaaaaatgaattatacctatatggcacattggccgcgattatgtacaccgcagcatcatccctttattgaatatatagtctttgtgctactcaaataactttgaaggcttcatctctgtaccctggcaataaaacctcggcctggaaagcttagctaccaggcctctctgcagcacgcacttgtccgatcagtccaatggcaccttgcggttccatgacgatgcatgacgagttagctgaccatgcctctagtgttgaaactgaattctgttctcaactgttcttggacaatagttttaacagtatgtagccatgtaggtggtaaagaataagttcatatctcatgtcagctgtcctgttcattgttttctaataaatggcttctgacagaccagaagtttttcatcactagctatgtcaagatccaaaatacgggcatcccacctgagctgtgttacaacagatcttgcagcttcaataagaggggcagtgtcacggattataacccaaccctgcataggcatcaaataagtagctaaaatttagacaacataagagtacaaatcaatttataactgatgcatgtacagcttcgaatataaaggatgtaaggcgggtgctgattctaaactaagcgtgcactattttacaagaaatgacaatgtcttcaaccagggttgccacaatatttgcacaaataaatacaatacttctgtacggcataattaagcaataatgcactaacttgtttcatacaatagaagtgttaactctcaacctctacaataactacccaactaggggcgcacacagtcattgcagtgccaaaattggcacacaaaaaaagtgggagagaaagtaacagagaaaaaggaaaatcctaaaccaacataaccaataaaggggacacacccaacaatcaccagcacacacaccatacttgagtcctctaccatatgaatcatttggttattctgaaccagcaataacttgttgtggtttgttggcacacatgtactagaacatctatatgcgagttacggatccacttttatgattaaatgattctgttacaaaatcagtacggagtatataattagaaaaggttgcttacctctggacgtaggatgcgatcaacttccaagaatatatcaagagtagaacatctatgcttttggtgcttctcaagtgatagaaagccatcagcatggaccatatcatatgttcttggataagttggaaatgcttcacacctaaacacgtttcacattttatcagtcgatcgaaggtatgtgatcagcagatcaacataactacaaatctaaaaaggttcttacacatgcatgttgcattgatctcaatgttatttacatatgcttattctacatgaaaagtattttcgttaagcatgctaaaaggtttatgtttaatggtgtttatagtttataatatgcaactttgaaagaaagagaaataggaatttcaaataagcagaacgtatacaacaccacctaaaaaagggggaaattagagagaacttgtgagccaagggcaattacttaccagtcatgttgaaccccaataaaaccacgatcaaaaattagcggcagatagtttggagcatttgtaggaacaacattcatcacccatacagattttccagccttaagtaaagcagcattaaatccaccgaagtgagcattcatgtctagaacattccttagcatgttaaatggtggttgtgggtcctcatcaccgggtctctttggatgatcagaaaatataagaggagacagcaaagaccagtagtttcgcaccattgagtcccagtttgcagtattctcggcaaagtcttctgaatgcacccctaacaacaaggcagagaaacaatttagaaatattcatgtcttcaccatattgtttgtctgtagttctgtttgttatttttctccagttgcatttagactgacacttaccatgtatatcaagttctgttgagttcaacctagactgagaaggccatgtagtgcgatgttcaatggaaatccatcgctgacttcttgttcctgctatgcagggatttagtggttggtaatatggtgattctggatcatgagtacaaagcacagggcctgatttcctgtgaaagaacacatcaaattcagcatgtttttaatcatttagccatatcatacaacttggagttatcagcaagcggttatattcaaaataagacataatgcgaaactgcaacatgataccttgaactgtagcaatccaatttatttgtctttttccacacaattgtctcatcttgttgtgacaacatctcccaacagaggctatcagcaaagtcgcgaatggttctccacttcttttgattttctttgtcacgcaaagccctgtgtgtattcagacttgatgtccacacaaagtatccactgggccttaataatctatccacttcaaccaagaaaccaccatctgcaacattacattaaggaaataaatagtaagataacaacattttgattgtcattcaagagtaagaaatatatacatgcaaattggtaattgcaagggcgggagcttcactgaagtgatccaaaaataagacaagaacagaatttgctcatttatcactaactaaaatgaaatcacttcaggtagatatcagtatgctattgaatatttggttcagtcagatttttatatcaatttttaatccttttcatgtgcagatactaacctaagatggcagatatgaaggacattaaggctaaaattagattgacaaaaaacatttcaaccaatgagatttagaacacgggaaagaacaaaaactatgcataccatttttgtcccattcaatattgcattttgcacaatgcaccatatcaaaagaaagatagggatatggaagctgtttcgatgcaaatgaaccaatcattgcagggattcctctctctagtgttatttgcacttgactgcctgacgcctcatagttagcaatgcacatggtcaagagatctctctgaaaaaggtgtgctcccaaggtaccaaatccacattctatatcaagaactgtcctaacctgaaattgttatggcaagaaacactattagaaaggcatgtgataacaattgcaattatctctaaccttataatagcaaagtcgaagatgaactagtgaaccatggtgagaaactagaaaattacttcagcagaaaacatcacgccaacttaacaagaaaggaagtgcaatataatctctaactttatcttctgtaatggatcatagtggatgccttacagtcctaccagaaaacttttgtagcacagtaaaggaaacccagatatacactttccagggcattggccatgcatagtttccaaaggtcagattaagtagaaacagaccagcactttccagtcagcccacttgccatgtaatatttctagagggccgctagtggaaagggcaccatgaaccagtgctgttgaataagagatcatggtgtaaacaaataagagaaatacactcatgcagagaaaaaacaaacagtgattatgtggttatacagaactttctccctgattctaaattaatagatattagagcaagtataatagtgagctataagcctactatgagcttatgtggaggagagaggtaacaaaaaatcaagggggttagctctcatgcaagagctagcttaacacaatctccaagataaatacattaaatgtataagtgagagatagagagaggagaagaaaattatagccaatcttatagctaatctattatatatgttggctttaagatggctaatagtaggaagtgagctatactattatccttgctcttagtgtcaaatgtactgctttatctatgattaacaaaacagcaaatccagaacagatcttcaacggacataatgaaagcctccttatgcaattacaagaatctgcatacaattaaactacataggaaattcctttgatgttgccaagaaggaatagagagtatgccgcctttcgaagaatcaaatttagtagtttacagaagagtaacaccttcataggcataaattccagtggtttatttcttctactaggcactagctagctctagtcgtgcattcattagctatgaagctacaaatcattaaaggcatatagattcaaacaggggatacaactcaccccggcctcattgaaattgaactcgttccgcagaccaatcatctctgcaatctgatgtgcgtaatcctccacaccatcagccatatgtgcgtccgatgggaatgagatctggtcctcctccaccatcatcctatacacaattgaaaagcaccaaattagaacctatagaccaaaccatcacctcagaatttccccgatgaaaataaattgctcacgcacctcttgaacaggctccccgacgagaactcctgcccgctaatccgcacgttgtctttccagatgaaccccttgccactcggccaccgcacggggatccggtagctccgtggcggcgcgacgaggcacgcgattttgccctcgcgcgagcactgccgctcgtagcttatcacgacgccaccgcccagatccgctacgtcgacggcgtcggacacgttgtagtagcacggcacgtagttctcgtactcaggaacgcacacctccgcctcccgcgcgcggaccccgccgccggcgagctcgccgatgtcgagcaggtccgtgaccagctgctcctgcagccggcggtacccacggctggcggcggccgcggccgcagccgcggcagcccctcgcccggcgtacagcgaccccgcccacgccaccgaccccacgagcgcggccgccgcgagcacgaggaccccgatcttaaccgccgccaccgcgaggtgccgcttcctccccctcccgccggcgccgccaatgccgttctcgctgggctccttggggtcgtaccgcgcctcgtcggccgcgtcataccccgccaccggcttgccgccgatccccgacgccccccggtacagcgcccgcgacatcgctgcggatctcacggccccaaccacagccgcatggaaaccagacacaaccggagcgcagcaattccgcaatagcacacccgcggacgccgcactcgcccgcccactccactgtcttcgctaccactaccagcctactaccaccactgcctcgccattgcacgcggcgagtaatggagagaggccgagagagaggagagggagatagataccgcgcaataatatcacacacccacgagtagtaaaccgagggagtccttgcctcgccttggccgtttcgccgcggatctccgcgctcgcctcgcctcgcaaaacggaacgggaggagagcaacgccacgcttgcgcgcacacacacaacacgctgtgataatgcgtaatcaatctctcgcttactcccaaaacacccggtataaataggggagggttttacggggttgggccgtgaggctgacaggtgggacagggaggtgtgggccccacggtcggtgggagagggagggtggcggtgttgcgagtggaactgatccttaatgaggggcggggcccacgcccgttttgggggtgtaccggatgcgtttgacgtgtgttcggccccccgttggtctcgtgatgctacagaatgtggaattgtttttctggacgtgccgccttgtgactgtgcaggggtgcaggctgatctgcagtgctgctcgaatttaaaatctctgaggcagggagattgtataatctatcgaagtgattagttaataattgtgtcgggtcattagatcccaaaccagtgtcgtcgccgcatgtcatgtgtaatcccggggagtgaagattttttttttaaaaaaaaaagaatattggtacagtgttaacactgttactacgaggttggcacggtcctaccgtagtaccagtcatagtgagttgacaaattacaacgaagcatagcagtgggaagtgggaagtggccataggagggaattagcgaaagcgataatgcggacgattcatttgctcgagccagaatgttgtgttttgatatgcaaattggaatagaatgctgtgctgttacactcgactcgtacgagcaagtggcataaacttggctaagctccacgtaattggtgcaatcaacgattggcattaatcaactaatcacttttgcacaggaccagacagtacagacccgcacactaaattactaatcagtgaagcttaattagaaaaccggtagtaccaacaatattcggggtccaatccaagcaggacgaggccatgtactacgcgtcggcggcaagcagttttctgtgaacaaataatctgacacctgacgtgccggacgccgtgacaacccgagatttccctgcgaatcaagcgaaaaaccgcgtcgccgccagtcaccacctcgctggccggctaggcctctcatctcatgcgaccatcatgccccgcgatgccgccacttcttcgcggctggaaaggcaaaggcgggcgcacgccgcgcggcccgcgccggcgcgcgcgcggccgtggacaaaagcggttgcagcggcaaaagatcgtatcatcccgtgtgcatagccgcgtagagtgtatgtgtgtgcgccagtgcgcgcgtgtgacgagcggaagatttgtgcaaaggccccagcgggtggcgagccaaccaacctgcagcgctgtgacggatggcgacgcgcccgtttcccacccggcgtggatggcctcgtcgctaacccaccacgagccactgctgcaaaaaacctcgagtacgtggttttttggctgcttaatttttgacggcatgtagcccggggtcagtgggtcagtgatgcttccatagagcgaagctacgccgttgccctcctacctggcaaccttcttcgcgatcttcagcgaagcgtaaagtcggttggaaaaggcctgaagttgtacgagcgaactagatacggagagctcatccactttctacaatgtcggctggtaactacaatgtactgcgttacttaggtagtgtccggtattgaattcaagatggggattagttcgatctgtaacagggggtggatctgattaattgtttctcgcattcgcatctacaacagctccagaaatctcctgttacgtcaccgcgacaccgtctaccaatcaaaccctccacctccatggttcatcaaaacgtcctccctctgtacagtacgtccgtttctcctgtatcatttgaaaagaagaacagaacatgcaatgtacgcgaacgccagtgggggcacggccaagctaggctggaccgcgaaaatgtcggtggaaaccgccgccctccagctctcgggagagaaagctcgagccctcacctcaatccgtcggtacagcaacgcgcccatactggctgcacagaggcttgacaccgacaaaatccatttacctcacctcaccatccaaggtaggagtaagctcaaacgcacgcattcaatggctctgatgagcgaggactcgtccctttcctgcccgtgcaatgcagttgcgcattactcccctcggcagccaagaactcgtcccacgagctgtgcctatccattttgaatcatgcacagtacgtagccagtgcgtcccatatcggaacatatggatttcagccctaggtgtcaaacccttcatatgtcagattagattggattgcatttcactagttgtatctaagtttacaaacgcattgcacatgcagtccatccactggatcgagacgccgacgcggttggagaggagaagagaggaaagcggcggcgagtggtcacggatctgaaaatgatagacgggtcactggatccgtcgccgtggagacaaaatagaacagctaaggatttttgacatggtcgtcaatgtcaaacagtaggttggtagatggccactttatatccatgtgggaagcggccaacacagcaccagtgcagtgcttaacgatcccccactactcgctgatgaattcttgctgttggttttgggccaaacgctgaagattttctccctttttttggtgctactagttgctgctcgctatcactcacatttggttgctcacaagcaagcagcaaatgtaactagtcaaacaatgaacagaaatcattggtgatggttcagtattgggatagttgacaatgaggttaggtttcagatctgaaaaattaaaagattttctcatatctctttttctagttgctgcttgctaccacccacatttgattgctcacaaacaagcagcaaacgtaacaaggcaaacaacgaacacaaatcattagtaatggttcatcttggtagctagtatagtatcgggataggtaacaatgaggttagttttcagatctcaaaaatgaaaatcctatgacagtcaagtcaacaaggaactaacgaaatagtttattcaaccattcaacgcgcgttgtcaagagtggccaaatttccgctcactatccaattcacggtagtggaggcagcctaaagattgtagcacgaaaagctgccgtacattcggcaaaaatgtttatggaattatgcatggtcttcacaaaccttgaacggggcaaggatgaaatgaaggggacacgtaacgcccataaaacaagcaaacatatggaacggaaacttgatggagcttgatgaataccaaaagcaaaacgacaactgcaccaaacacacgttgggtaaaaaactaaagaacctaagcacacatttcggaatgatcacgctgaacagcccatagaattgtaagtcaagcaaagctttcgcacatttcccatcgctgatgagcagttaccgcaggatgcgaccaatcaaaaactggaaaaaggcaggccaaaccatgcggaaatgcagaattcccagctaatctcatatttttaagttgttatgaagaacgcgccatctggttacaactgctacggacaaacactcttttccgcagaaacagtaacactcatacataggagcaattaaacactagtaggaacattttacgacttcaactcaattcagaccatctagtacttcccactataacaaagctgcatgttttatggatgtgatattttgattagttcgacagaaacataaagactacagtcaaataatatcttgagttccagttccaggcaacttaatataagtatttgcctatacttatatggtcagctaaacaaataatcaattagagaaaaaaaaagaaccgagtttttccgatattgtcacgtaggcagagccctgtttatgttagcaatatgtcatggtaaagacctgtttatgccagcaaatatgaattttctaaaccaagggagaaacctgaaatcagaaataacatggtaaagaccttgaaccgaaacaatttgatcgtaatcacagagacgcattggtacaagcagaacggaatattcattctcaagttatcacgcatgtaaaatgtcttaaggtcaccacaaggtgcagtcaaacagattgtgtgactcacatacaagtcaagaaacattgataaggaagtcatgaccgggcaaaataagcatcttagtacttccgtatggggaactcaataaaaagacgttgacatctcatatttgttattaacttcaagtctacagctagatgaacaaaatgaattatcaccactgacatggttggttctacacataaaatcacctcccaaaacaaggaaaacaagcatataaaatgtactgaaactgaattatgaaataaaacaaatattgcaacaaaagttttttttttttagttgtctattagaccaggagggctctccagccctccgcagcatccatactggaagtgcagcagacaaccactagacaatgtcttatccatgaatcatagttatatatcataacccaaatgttaaaaatattagaagcaacaggatcctgaaatccttttgcacttcacatattccactgatatcattcacacaataactcatctattgaaatcataagccctgaaagtcagaagaaatgataacaagggctagataaaacttaacataattaatatatgtaacgatgccatcaaagtagtctcagagtggtgtatcatttgtgcacagaaagtgatggcaataatcttccattatttccatggtaatatgatcttcaaatactctccattgttttatcagcataacattggcacaacttacaccttggatcagagttaatatgcttaaggtaatcaatgaaatgaacgaattactccagggtcagtaactatgctgagcatgcaagtcaatgctcagcgctcacgactattacagctgacagtgaatcattccaacatcttggcttggtattatttcctagcagcagcttttatccgagatataaggcttgacccagagtcacccaagccatctaaacccacgagttttgtcccaaaatctcggtacagtgtactcaatcgttgctcatcaccctccattgcagctaaattggctacattttttcgcataattaaaccatagaggaaaagcgagccagatcctaactttcttgcaccaattccaacacgtaacaatgaaattgaatcaggttcagaggtagatggatcatggagaactgagaagcccccaaaagcagcatcaggagtacggaagagatcatccagatcaatgttgtcgactttaacttcatatttgacttcattgttaacatccattttcttaggtgagtccacctttttcgctctcctcctagctgctcttacaatgttggcagcctccctgtacccgctaagtaaagctccatgcatcgttgcaggataccgcctatttgttgcctccccagcaaagaaaactctgtcgcacacactctctgccagaatgtcataatcgtcaccagaagatccaatagccacataagaatatgaaccatatgtaaacttatcagtaccccatcgagtacatatggcctgcaaaggctttggaacctcaatcccctttggtgaaaatattttcctaagtgtttctagcaccttctcaacattttccgctggcgatgtcttctcaaactcgattgcagattccccagcaacaagcgcaatgagcagtggccctcctgagaccgatgaatagctatagaacaggaaaaattctccacgctgaccagaatcctccgtcaagtgcccaaatgtatcgatcctgccatcccagaagtcataggggaacagcagcacaaccttgttaagcaaaccaaaacccaatctttcgatggcctctcgcttctgagctgggagctcaggcacaaactgaatgttacccttcttgagcacaccaagggggacagtgcagagcaccatatcaccacggaaagtctgtttatccgtgtacaccatcgcaccatcacacccatactgtatccttcgcacattctgcccatagaatattgggatgccatcagcaagcgcacggacaaaacgagaattgccgccaggaataaagcagtggtcaccacccatttcatatggatcatcctgatcccagaaggccatggatagatcaactagaggagcagcattggcatactccagattagctagatgccagtcaagaagcattcgttcctctcgctcagcagcgacaccatgtgccgctcggaacgcctccaatgccatgccaagtgacacatccacgccatgtgggatgctgtccgcaacaacctgccgcagttggcagaccttatcaagaagctggttaaaggcagcctcaacacgggcgtccatgtcagggtcaactgggcgaccatccggaagatacagcgggcacttgtcccgcaccttatgcagtggaaacccaagctgccgtgcaatgacaccaaggggatttccattgataccggtgagcacactgcctccaagatcagcagcagctgcaatgtcaggatattctgcagcagtggagcgcatagacttagtaaacacacggccgccagggcgcagtcgtccttcaacaatggcgaccttgaagccaagggacatcaggtgccgtgcagcagcgaggccggcaaaaccagcaccaacaataaggacagaggggggaggaagggaaggaggggggcacggtgggagggaaataactgatggagcaaggccaaaattgatgtacgcatggtctgaaaggaaggaatgcgcagcagcgacgaggtgggcgtgctcggcgcgaatggaggcgagcgcggcgttggatgcaaccggggagagcggatttgagcgccagagcgcgaggacgtggttgcggacgacgagatagttggtctggtcgacgccaccgatgcgtgggaggacggcggcggcgacctcgtcctcggagagggagtccgccgggaaccccgccgcgagggctatgagagcctcagcatcgagctctcgcgcgaggcggagtgaggaggaggtcgggggccgaccacggcggcgagggacgccgttgagatgcgccgcggatggggcggaggcggctgctcggaggacacggacacccgccgtggggatcatgccgggaaactgcttcttacggcggcggcgcttccgcgcgatggtcgagtcgtcaacggccgcggtggcggacggcgcggacgacgtcggcgggtcgtcctccatgggctcagcggcgccggcttcgtccgccgcttcatcctccatgggatcagcatccgccgcggcatatcccgcttcgccctcaatggtccccgcggccgccgcagcgccttcagcttccccctccatggcctccgcagctgccgcctggccctcgtcttggtccattgggacaggaggcggcggctccgaggcttcggctgatacggcctccggctggagcggcggctgcgcctcgctgccttcctccattgcgggtttccgcgtggcggcggcggggcggcgagctcgccggatgggagcgggggatttgggggagaaattgagagggttcaggggttggatggcctagggccggcactgtgcaagaggatgggacgggagccggaacggccagatcgactgattttccgtaatacgagttggaaagcgtattccggtgtttcacgttagagcacctccaggagagggccgccaaacagcttacacagggcagtcatctgatggcccaactttgccgatccacgccaccactagggtaaagtccacttgaagtccctcatcttgtcatcgagtttgaaaaagaaaatccttaaaccgtaaaaccagatataatgcaaccttgattttgtaaaaatcatttaaattaggaccctcaacagtatggatgattagtttaatgatgtggcaaattgacccggtccactcacgctgactagaaacttaagttgcaaaacaaatatgccccctacacgtcatcatctccctccctcccctttttctccatctctccccctcattcttctcgagcgcactcgtaagaccaatggccaaaacggcggcatgacaggtaagtcaaaccaccacaactcataaggatcgccatggcggggagggtggactccggcacgtcctgtcactgcagttcgcgaaacacggtcatagtagctctctcactgatgagggaatggatgacgatggtggccaaggccgagcacagtgagaacgttttttatctctgttgcgctcatctgggccaaactccctctttgccttcctctgcgcgacactacaataaacccctaggcgatgcgaagccaatgacatgagctgcgggaagacggtagccacaatggtcagctgatgtgaaggaaaggagggagccgggtgagctcgagcccctcctcttcctcgccgccaccggccttgagtgctcgagctcatcctcctagcgcggtcgctatggtgttcctccatgagggaaggggcaacagtgccggggacgagcgggaagaggaagagcccaagttgccaagtgcgttgtcggtgttgtaaaggcaccacatcgccattgtcatgtggtatttagagccacatcgttggcatcctttctcagtcgagctacgcgaaacccctttatccacaaaccagtcatgtggtggtcgccacacgctaggatgaagatgacaaaaggtgccatccgcctggaggaaaagtcaatccggttgggggaaacccggagattgattacgacattgtggagatggcacaacctcctgctagcggcagccatccctctcctcgtcgttctctgtcttccgcacctctccacgttgctagagaaaggaagagaggtggatgtaggagaaagcaagaattgatcactaacatgtgggacctagtccaacgttgacttaggccgtcacgtcagttaaaattgggtaaaatattgtatgagaccacgggtgatccggttttgtaaattgataggcatgttatatgtggtgtcatggttcaaggatgtgatttaaactcgatgtcaagataagagacctaaagtgaacttattgcctatcactattacgctgtagactagtagcccacagggccatttcctttaagcccatacaggcctacagctttaaggaccattctgcaatcttcagctgccaaattcgcaatcgggaacggaattccgccctgccacagtatgcatttcgagtttggaaacaaccaaaatttctccatctgtgaaaaaccgtactacacgtctgcattgcatgcgtgataactgcctccggaccaactcggaggagaagcacgctggagtaagatcgatcgagacagacctgcaacgttacatggcgaaagatccaaggcactccgccggtcacaaacattcgcagactccccggtacacataggcacgtccagcccaggtgtaaatgacaaaatccacgccattgctgagcaagatcgagcacgacgtccacaattaaaaccctatcgaattcaagcactggctcggtgctcctcccctccacacccaaccaccaacagaaaacctctgctgcgtgttgctggtacaaatctgctcgatatgaaggggagaaaaaaagagcaggaattcatcgacattcacggacaagcagattatggcagagcaaaccggatttcgtccggtacatatccgacgttcgccagctatgtcgatcgagaaattgccgggaagcaaacggacggacaggcgcagcaactccttgtgctggtttgaaaggggcaaccactaataatcaaaattgtccgcgcgggagttggcaagaactgtcttgctgcgcgaaagggacgacgccggggttgcacaggagaaaagaagagaacgatccaaacaagccagcaaattagccattcgcagggttgttcttgcacgacattctctgcatgcccggccagccagccagctaagattattcagtgatgatatcggagagagcagagaggagggtacgatacgttggtgacttgctggtgtaatccaatccaacaaacagcatgagatggattgacgctggatctttgtcactttggcttacgtctctttgcatctctctctcatggttgtcgatgagatttttcatctccttgttgcttgttattaaagaaagaaaaccagaggttagtgctgttcacaaggagatttagtagtagagctcatgattgatggtgaccggttaggcggttagctccattgttaattgctgacgaagggagtaaagaatatatatgtttgtgggctggaacccacggctgaattggcaacgggtgcgtgcagactccatcgatccatgttgctagtattttgcgaacgctatccatctggattgcttagaggacaggttggtaattcgcggaaagggctggcatatccatctgttcctgtcatcccttgcatattttgatgtgtgtgtctgcatcttctgcggccaaagctaaggggttgggttgagtggagtgcccttctctctcgctttctgagttggtgattccgttactgcagcgactgatgcaatgtcaaggaatcttccatcagttgagtttggcaatataacggaaattccaaagggtgaatgccatctctagcttgtaaattgtaataggagtaggtcacaaggaaagattattgctcccgtaccctgtaaatcgtccttttgctactctcattttattggccttcaggtatcgtgcttattcagagctaaggctaattttttttttgaacgaaggctaggctaatttaattgtctctgaaattagaggttgatctacatatgactaaattcaaatggaagagggaagtccaacttaagggcatatgccactcattcttaatgtgggattaaagaacacttcacaatctttgaagtcaaaagttgatgtacacatcgagaaaaagaataacaagattgactctggtgatacctgttatatctaaagcctataatcttctttacatgcatatatagatctagtaatgctgaattgcaacagctcactgattaatccataaggttactttgtccatcataattggttgacatggcttccgttttgttaaacgaaatgtaaaccaaactgacccggccgtacacgagtgtggctcacacggtgctgaactggtgactatagtgtccatgccacaatagatcaccgtattctgcaaagaggtcaaggcgaatatggtttatgctaatctcgcggtagtgctcttttaagccagcatcaaagcttcgtcaactaaaggttttgctgccacgcaagaatgcagcctttgctgacgtggcgctgatgacccggtaatcttgcggatcacccaacaactacacttaattgcccctcccgtccccacacaacgactcttcattgtcaactctaaaatatatcctgttcttacacgaaattgtcaacagctgcattcttcagagtccagagtagtactctacgtccctaatcccattgtttcctccacagtttccctatcagtcaccactctataatatctatacagcatgttaaaaaaaattgagagataaaacaaactgcattaatgacttagttctcaatcttaacgaaataaatggtacacacgcgacaacataagtcggccacggtcgtacgaaaacgctcttaattaaatggagcggtatgctgtatgaactaacgacgatgctgatcggcagtggagacacgtacgctggtacgcgtaaaccgacacaaagctacgcggggtttccgtctgtttcaggctagagctgaacattcggacgataccctacatcagaactactccgttttcactgcaagatgcttcgaggttgaagaaaggcgatcgaggtccattgctagtgaaaaacgatatgtgatgcccatgcaaaaactgataagctttacgccctacgaaaacttgcagtacgtttccttaatgtgtctgtccttctgtggtagataatgaaaatcgggaatcaatccaggttcttccctttggcatcttgacacgacagtgacactgttcctccctccctcgctccgtttagtttgtgcatcctaagcaagcaaggatgggagagccacgcgggcaaaaggagttgcaaatccacaagcaaccgcaaccgaggccaacccggagacgccgccatcccccaccaactcgatctcgcgcgcagccagtcgaagcgcctcgtcacgcacgtatgccgcgtgccttcagttaacgcgcgtgttgggctcgggctcggctccgcccgcgagggcgacaggccggagcggaggacgccctcgcgcggtcgcgcccacttcgggtgggcgcgcgttggcagctcagctcacggccaatctgaaaatacacaacacaaacacaacacatgaagggagacagagacgcagagcaaagggagggtgagagagagagaaaaaaagatggagtacaaggaggcaacaggggcctgcaaagctagtaagagtattatagtagcagtcgattggaagctagactagaaagggtgacgcagctgtcatcccacaccggaaaccctctcttccagcgcatagcccctgtccatctctccctcctccgagtcttctcctctcctcttaacaaatccctcttcctctgcttcctcctctaccttcctaagcctgagaaggtgggagaggttatggaagaagagttagagtactactacttggaaagcgaggagttgggagcaaacacgatagaggctgatccctgtacgagacggcgaaatcggccccgccactattaatcgagtttgattgccatatataggtgtaggaacgggaccgggaaagagttcgatcgttataggatcattgatcgatcaatccatagtcttgcgaagggagaagcaagcggcggcgcgtacgtacgtcatggctgcggcctcgtcatcgacgtcgtccgctgggtcggcagcgccggctcacgcgccggcggcgggaggtgccggcggcggcggcagcagcggggtaccgaaccaccggacgcggttcggcgacaccacgctgaccaaggtgttcgtcggcggcctggcgtgggagacgccgtccaagggcctgcaggaccactttcagcaatacggcgaaatcctcgaggccgtcgtcatcaccgatcgcgagaccagccgctctaagggctacggattcgtacgtccctcctctttctcgccgacgagatgatcgctcgccgccgtgcatgcatgtattcatgtgcttgatcgatctgacacgagatgcatctgtgtcgacgcaggtgacgttcagggagccggagtccgcgcgggaggcggtgcggaacccgaacccgacgatcggcggccggcgagccaactgcaacattgcgtccatggggccgccgcgtccgtcgccgtcgcgaggtgagcaaattaacccgacgaacccccaaaaccaaatcaatgcctctctttccattacttgccagaacaaggcacgcgcatgtgcatggcagcaataactgggccatgattagcggtaaaccgattgcccgcacgcaatcaaaccggataagcttcgattagggcactccgccaatttttttttacccttgctttttttcccctcctcttcttcgtcgtcctccttgcgtgcgctgcggtggtgggtcgtgttggcatggcagatgggtggggcccaggtccagcttgctaaaagcctaaaacactgggcgccagcacacagtaaggaggacgacgactactacgagtactgcgtctgcattgggaggggaggcaggatcagacatcacattaccatgcctcatggctgcgtgtgcttgcttggccagctagcctggcctcacagcagttactacaggtttactacccctaattatctgcagcatttgctgcaccttcgtaccacacagtagtaggcgcgttgatctgtttggtagttgctgattaattagattaattagcgtaatcttggcagatttgtggttatgggatggttgattaattagtggggatgaactttctcttttatgatcttatattctttttttcttattgggagagaatttgctattgggagagaatttgggtggtttgactagagaatgcagtggcgatatgataaatcgttccagcgagaatgaggtgtaaaggggttgggagattgtagctggagaatcaggaatccccggcggccgccttcctttcttttctggtgaaaatcgatcggtgcgggggcattagaaaaatgcttcatagcatataccactctttcgcagtctttgaccggtatggttgggtaccaactgccaacgattggaggaagaataggtgctagctagcacagttcaatgttgtggctacttcgcatcaagtgtgttgggtccagtatccccttgtttctttagcttcactttcacttcattttgtgctcatccatatagggagatagtacatatcatttgcgtttcttacaatgcagcacgcacacatgcatgcccttatgactttaagccgtactgtgggtgagatgaaaacctgcatatgttttcctttcaaaaagaagagagagaacatgcatataccgctgatatcgtctagctattatattacgagaccttggtgcttttcataaaagaaaatacacacgaggggttacacagatgggttgtatacttgtattggtccttcaagttttttctccttttcatgctagaacaattgggacatcatactatttttatacaaaagaaaattgttgtttggtgcactacagcacaacagtgcctaaatggagttggttgtagtgctagctagccaaaaacagtcttgaattgtttggcggtgtgctaatctctaccaaaagaaacttctaaaaattcttctccattcgccatctaaaaatagaacaaaaatgctggtgtccttttgtgctgagaaactgattttttatgttactattagacagttaatattaacctttttagagggatcacaactcagtagttataatattatagtatcatttgctacttgcacccatgcatgttagtcaaacccagtcaatgtaaggagcacatggtaacacctctgtgcacagtccatacaactgttttgcaagccttgccctactggctactgtacgctatacatacatgcatacacctgctacccctgcacagttcatttattttccttgagtcattgtgtgtgttgttttctctgcagcctataacatgccattttgccatgcctaacatcatttcccctcgtttgtctctctgcagggcgggccccacgtgggtccctcttcccggatcagccacacatgggcccgcagccttacatgggcggccggttgccgccgcagcatatgacggccccacctcaacagatgtactaccatcctcagttcgggtgagtatcaaacttcttctttcctcttcttttttttaatcttttttcctctataaagccatcggatgcagcacgactcagaccccacgattacgatgatgcatggataatgaatacgtacaaccatcgtccaaaaaacacgcactagtatattgcaccgtcgtcatcgtgggatccgagccacgctgcaaattaacctgaaccttatcgatcagcggctgtgcatgcgacagcagctaagcattagctacacgtccatatcagcaccatgtcattccctctttgggagtttgcaccgtgtttccttgttagagcctagctgtaaattgcactgcaatgcacaaaaaggataaataggctgtttaggtagtgaggcctccgcgtcattggtgattggaactggtggttcatggagacgtatgcggtttttatccatgtgggtttttgaggtagacatttggagcccttattttgtcgaaagagatggtaccttattactaactgatctcggaggtaaacgggtggagtagtagacaagaaagtcgttgctgctaatgcacggtgattggagaggctgatctttttattgtactagctgatgggggtagctagtaccgaattggcgcctgctgctgcgtctcattttcacggcaatgactagtgtgtgaggtcccgttcctttcgtggcagcagctttccgtggttcgttttccttaattgggcagaagggttcagttgccaaggagcacagagggcccacgtgtccccattcccactcctgttgggccctgcgtgatggcccattaagcctgggccgatgggagggagacagcagctcagcaatggccaatgggcattcaactccggagggtcccacaccgtctctctctctagagtctagaccaccatggggtgttgccttcccagcaaacacactctgcactttgttggttttctgccgagttaaatgtctgcattcagatctgatgccacttggctgctgctatgcaatttgcctctttagtttgttttagttataaccgtggacctgtacagatcgttgaaacaggaatgcatgtgtggcatggcatgtacgggattttaaatttggttatattttgctaagaaccaccgctgaactagtagttgagttgtttctgcctttctcatatgcaaatgtaaaattagacgatctgaaagttactcttgatcttgatttttcttgaaaaaaggttaataatgttttatgtggatatttttgcacaaagtttattttaaaaaacagagtccagttttgtttttgacaaatgacaataactgcacttttatttgatgggggttatgatttagccagccaattgcttttaggttcatacaatttgtacaagaaatgaggaatttagaacccttttcctatgaactgctgctgccactgaaaaactggaagtacaagaaatgggaaaagtttattgctctagttttagctagaatagattgtgtatatatgagataagtttgggctttacagccaagatagttggtagatatgtctgctgtctccaagagaatggtgggactcatgttcggctcaatccctctcaatcttttacaacgcactaaagaaattatgcaaacttttgcaggtactggtacccacaagattatccttaccaacaggcaagcatcccatccatctccttgttcaatgtttgacgttttacttccatcacatgcgattggttcttgctacatgcatctccaataatttggtaacagtacacaaagaatagataagtttcacagttggcgttcatgttctgaaactctgaactcacaacagctaaagttgtgtcctgcacctcaaaagcttgaatactctaacatttagtagtattgattatctgcacatattttctatacaccagagcactaagttatagtaatagacatcagcacaagtactatcatcttatttttcccatctaacaatatatactggaagtatctagagtctgaatcatcttattttccatgtgtcaatatgtgctgaaactatccaatgtctgaactcctcagcatgccgtgtacaattcacaagcgctacagcattactaccctcagctgtatggtccaacatccccttcaacaccgtcgtaccagtttatggggtacatgccgggtgccctgggtccaagggctggcttctctccgatgcagcaacaagctccacggccacctttcattcagcagcctgcgctgcagttcgacgggggctctttccctccaggaccttctctcccaccggatttcagactccagttgccccctcatgcactctcaaggcaaccagatgaaacaaccggtatgtcattgttagcctaccattcagatatctattactgtcatttagaaacatagtacgttcttgtcacagttgacatcatttagaaacaacaccatcgtgacaaatttatgcctgactactgctgaatatgttgcaggtgctcaatcagctccgccagtctccgcgagtgcagctgcaactccaaccacagacagcaaggaagcatcaaagactgtagaatcaaattcagatctaaacacctcgaactgacttggtgaactgaaaattcttccgaaatgactcaatgtcagcccacatggtgccatggtggtctgtaacagggctccaagcactcatttcttgactgaaaaaaagcaccaaaagaattgttctttcattatttcatattcttttccaattttcacaatgcatttcttcggtgaatccattgtatggcccaactgaacttcacgaaaaaaaatctgtaattttccataatatcttccggcgcgtgctgttgttatctcttacatgcaccatccgtctggattactagtttacaaccaggtctttaccaatttaccattgttacagaatagatgatcatgatggagcatcttactacgacaggtgaaactgaaaccatccacaaacctgaaatactgactagtgacattggtgaagcagaggctgtctaacctgaaattattgttgatctttgttctccactccagaactaatatttgatatttctaacaagatagtgggagatggtcacatcatagattcatttacccaattacaaatcgcatttttaggattgatcaacaacaacaatattcagcttgcgtgatcacctcttgcaagcagaaattcaaccaaacgatctattccggcgctcgaagtgcctccttcctccgttgccgccacggctttctccttccacgccattgctttcgctctcatatccttgcttttctctccatccatggcctcttgcacgagccgtgccacctcctccctcttcacgtcggtgtcaatttccagtccaatgtcccacttggtgcaagcgtagcggcagttggtcatctgctcggcgaagaacggccagcagatcatcggcacgccggcgcttatgctctccagcgtcgagttccagccggaatgcgtcaagaacaggccggtcgccggatgctccaggacttgctcttgcgggcaccagctcagaaagatccctctctctttggtctcgctgacgaactcttccggcagcatggccttctcgctggcgacgaggtcgggcctgatgacccacaggaatggccggccgcagcgcgccaacccccacgcgaactcggcgagatgagccggcgacatgacggtgatgctaccgaagttgacgtacacgaccgagccgggctgctgggcgtccagccaccgaaggcagctcgcgtcctccttccagaggttgccgccgatcgcgcccacctcggggcgccgcgccgctgcggcccccgcgaacgtcaggagcgggccgactgtgtacacgcgcgggaagatgcggcgcagcgcgtcgacgacgtcgtgctccaccgcgtcgaacgtgttgaggatgaggccctgcgcgtggcgcgcgttctgcgcctcgccgctgtcgaagttgagcatgaactcgtcccggtcggtcgtgcggatgaagctgggcatgtcgcgcagccggatgcctggcatccccggcacccagtcgagcacggtgtcgaggtatccgttggtcaggtagctctcatctgcaacatgtccatgcatgagcaaaaacattttaccgtgcgtacagccatacacaataaaacggtaatcgtgagttcaagtgtactacctttgagtggcacgtagcctctgtcgatgagctcggcgtagtggagatatcccatgaagccgcaggcgctggtggtccagaacgccggggcaaggatgcccatgtcgctggccactctctgtgcgaagctcatcacgccgtccggtataacgcagctcaccggcggcgtcccgggctcgctgttgagccgcgccaggagggccccgaacgccgcggggccgtgcgtgaggaaggacgtgcagaccgtggggatgtcctgcgtgacgtcgtcgttgtcggattcggacggcggcggcaggccgtccgggatggtctcgaaccggaagtcgtcgaggccggccagcgcgccggtgccgcgggaacggaggaggcggtggtggttgtactcggagttgacgaaggtgacgtggaaccccctggagtggagcaccttggcgaggtgcaggaggggcgtgacgtggccctgcgccgggtacgggatgagcacggcgtgcaggcgcgagtttgagcccatggcaagcgatacgattgataccaaagtagagtacgtagtaacaattataggagtaactagcagtcggtactccgggattaaatgttagaggcggcagttaatgtgcaatagttgatccccttcacgatcatctattactcccgattctgagcttaaaattttcctaaaataaaaggagaaaattatattggtggtatacaaatgatgtgcgttagttgggtgtaatttgtagatgaacttctgaaatgctatttatgcacgaacttatctagttcatgcaaaacaagactaaaatagctttgtaaagttaattttaccaaagcgtgacattcattcatgtagttagtatgtataagatatccactcttctgtttcatattataagtcgctttgatttttttctagtcaaattttgttaagtttggctaaatttatagaaaaaactagcaacattttaaacacgaaattacattcattaaatctagcattaaatatattttgataatatgttcgttttgtgttaaaaatgctactatatttttttctataaactttatcaaacataaaagaaattttattagaaaaaaaagtcaaaacgacttgtaatatgaaatggagggagtactatatttataaatttactctctactttatcattcatcattgaaataaagaatttcatttatttctaacctgtcgatgagtgatactcgtagaccggatgagtagagtattagggtacgttggaatgagggtccacgtagtacgatatcaagcaaacaaaagacaaagattatacaggttcaggccccttgtcaggtaatagctctagtccagtttatatggaattgatggtgataagaatagattataaagagagtagtcgaaatatatggtactgacgagatcgtaatcgatggattcgatgagatctctcggtgagttggctccacgtactccggcttcgtaaactatggtgggtgtgttggcgatagaattggatgcctttcaccccttcctgggggtcccttttataccgtagatcgccttgatccccaagaaaggtttgaggatattggatctggtatggtataacagaaactccatcccttccgagtaggactttggaaatcacttgactcgtagagatattttctataatttgcgatggattccaaacaatattcacgagaacgattcgtgtacatgaaggtataccttatcgatatattccataaattgtaggatagaaggtatgccttatccgtaaccctgacaatagcccccgacttcaactcaaatgaattcatgttgtcatccacgacttctctcgctagcggcttgtcattcttacttgattgttcttggtgcggagccaagaagacgagaagctattgacaacgctaagggaagtccaacggctcaaatatgaatttgaattgaagtctgaacaaccacccttaacgggccttagggtttttcggcggcaatgtctctccttccttggaatacgaaccgccaggtagtacgcctatttaaatgggttttgggatctatttcaagtccgtttgccgaaaaattccccaaccttccagcagcctcggacctttcatctccccaaattccctcggttctttcgtccccctccggagtaacattctaaaatattttcctatttcattgcttacaaatatgccataaagcaatgaagatgatttccaaaaagcctttcctgccaaaacgagatcttgcgatactaatcatctgaaagtattccaagtttggattccaaataattcccagatgttgccaacatcatgcactgaaagaattctaacccttatcattgcttgattttcatatctttatttgcaatcattatgtctcgttctatctttttgttgaatagatatatgtctgaatagcaaccttctcatacatcagcacttagaattaacaagattattcatctagtgacctttagccttttacaagttcatacaccaaaacaagtattttacaagttcgtacactaggttgcattcatacgacaattttgtatacaccgatgcaatttacctacataaagaaagaaaagataaacagatatacaaaatgcacctgtattatcctgacggtataccacggagggaatcttttatatggagtttggttaaagtccacgaagttcgcaatcaaccaatttccgctggataagcccagaacaagtgaagaacaaccaatcaccgctccatcatcgaagcctcccggttgatagcagccagggtggaacgtgctggatttttcataattttgaaagtaactttttctgtagaagcccgtgatgtccgtgcatgtacgcatccgcaccaggtgtgtgtagccatccaagcggccgagccgttccttcgctaccacagccgcgtgcgtcgaaactgtcactgctagctgctcgtgcgtatccactggtgtagtggccgagtatcggagatcacccggagcaaggataataatatagctagctgccggctctataatagtaccatgtcacctatagccatcactaatataataggctggctgttagattagctgtttgtttacctctattgaagatttagatatttaatattcgcatatacacctcatctcctcgtatctggttggaagaaagcagccttttctcgtgtattgcgcttcagtcggacgatagatggaacactcactccatcctttttctttcctttttactcctccacgtcagatttggctgacgcgtagtgtgctagcgccggctgattagagcgcacggctgcacgggccgcgagacgaatctactatctagaatccctttccgtcattttgcgatctagaatcccggagaaattgagctggtgatcaagtcgccatccagcagcacagttgttttgtgctagcaaactccgtatccttccatgttatactctgacacgaacaggaattttgactgaccaattatttgcactgcatttctcagtgccactagatgagcggaaagcacgcacaagataatttgtgatatgataatatgaactcagcgagcgtcactcccagaagaatgcaagaattcgatcagacggtccagatttctgctcgacgaacctccttcctctgtcgcctccttggctttctccttccacaccatggcgttcactcgcatggccttgcctctctccccctccatcgcctcgcgcacgagccgcgccacctccgttctgctcacgttgctgtcgatctccatcccaaccccccacttgtcgcacacgtaccggcagttcgtcggctgctcggcgaagaacggccagcagatcatcggaacgccggcgcatatgctctccagcgtcgagttccacccgcagtgcgtcaggaacaggccgacggacgggtgcgagaggacgagctcttgcgggcaccaactcgccagaacgcccctctctttggtctcgccgacgaactcctccggcagcatggccttctcgccggagacgaggtccggcctgatgacccacaagaacggccggccgcagcaagctaggccccacgcgaactcggccagatgagccggcgacatgacggtgatgctgccgaagttgacgtacacgacggagccaggctgctgggcgtccagccaccggaggcagcccgtgtcctccttccagaggttgccgccgatcgcgcccacctcgccggcggcggccttggcgaacgccgggagcgggccgacggtgtacacacgcgggaactcgcggcgcagcgcgtcgacgacgtcttgctccagcgcgtcgtacgtgttgaggatgagcccccgggccttgcgcgcgttctgagcctcgccgccgtcgaaattgagcatgacgtcgtccggatcggtcgttctgatgaaacttggcacgtccttgagacggatgcctcgcatcccggggatccagtcgatcggagtgtccaggtatccgttcgtcaggtcactctcgtctggaaaacgtacagtaactaagtcaactagtctaaatagttactactcactcatcactaattattcaaggaaggatcgtctaattgctaatcagtgttgcgaccatttgacttccgatatgaacttacttaagcaagggaaaatctcagctgcatcaagcataggtgaagtggtaatagtcatcaaaagttttgtacctttgagtggcacatagcctcgtctgatgagctcggcgaagtggaggtaacccatgaagccgcaagcgctcgtagtccagaacaccaaggccaggatgcccatctcctcggcgaccctctgcgcgaagctcatcacgccgtcggctatgacgcagctcaccggcggcgtcccgggcgtgctgttcagcctcaccaacagctccctgaacggctcggcgctgtgcctggtggtggacacgcagagcgcggcgatgtcctgcgtgacgtcgtcgttgccggactccggcatgccgtccggcacggcctcgaaacggaagcccgcggcgccggccagcgcgccagggccgctggaccggagcaggcggcggtggttgtactcggagttgacgtaggtgacgaagaaccccctggcgtgcagcgccttggcgaggtgcagcatgggcgtgacgtggccctgcgccggctgcgggatgagcaccgcgtgcgcccgcctcgcctcgcaggagctcatcgccgtgtgtcttctcctccggcgtgcagacggacggacgctcggcgccgcggtcaggccaaacgtgttgctgtcaggtggatttgtgcatatctgatcttgagaaagcgccgtgtagacagagcagtggcgcactggcgcgtgaaggccaaacgtgtcgctatcaggtagtaccattcaggtggatttgtttagagcaagtttaatagtatagcccattgattactccaatttgttccacgtcatttttatcaagctcaagaggcagatgatacagtaagtgggctataatctgacgcatcacacatttattttattccacgtgggcccacatatctctctctttgttcttcttctccaccagcctgtccaagacaacacaagaaatcatatcaatctaagatcaaaagatcaaaacttgatgtctaaaaaatcaaatcgaaacaagcaagaccacgaatgagttgtgtgatgaataaaatcacgtatcgttgccgctggaaggagctgccgttcaacatgagaacaagccgatctcggctggtagggccggcaagaaggccttttaccattgctggccgtggaccatggtcatgccctctcaaacctcgcttccatcgccatggcatgagcccgtgcataccactgctagatactagctggattcaagaggtgcttaccagatctaagtgaggaaccaacctcgagcacggtggccacaagcgtcgccgaccgcggtgaaccatcggcaacctagctccatacagttgatgacggcgaccccagctcgacaacatcaatcaccatcggacgagctccccggcggccggcgggtgagtcgtggactcatggttgcaaacttgcgacgctgcatcaaccgactcatctcgcagctcgtgtatgctacctgctgggcccacaatttcttggagcgcgcgtgccgcttggcgactaattagtcgcccgctaacgcactctctctcctccaacgcatcatcaaacctacgtggaatcgctatcgccagcaatcggacgcctattgtacctgctcttatgccggcgtagtggtggcgactggcgtggagaaggttgacggccggcgtcttggaattgggcttatttacgagtaaagtaagcgtaaaggctaaagagcagcacaagagtgatttgctcactttgataagccggctaaaccagattgtagagagtacccaccgcatgtcaggccgtcatctaggagaccaggacaggtgacgccaaagcgacgaccggagagaggacggggatgcaggccgccacggccacgtatgggatgatcacagcagtcccgttgatctttgaaggcaaggataacctgaggcccagaagcctgaacttccaacatgattttgcgtgaattctgaagggaataagttcactttgtgacctaaaagtgatcgaaatctaatccatggctctagatcacaaaaccagatatctcaacccccgaactcttaaaaccggtgtaatttgactccttaagcggttttggagggcggttttgctgacgtggcgactacgtggcggtattgactgggtctcctttacacgtggcgttgacgtggcatttaggtggcatttataacttaaaaaatatgtgtgggactcatttgtcatcgacacataaaagaaattgtgggacccacatacatgtggagcccacaatcatcctctccccttcttcctcctccctctctctcttccttctctcgccgcggtcgggttcatccgggggcggcggcgggcgggagggcgttggaattaccttctgctcgtggttcttcgcaaacacctccgggtcggtggagggttcggcggtatctcagccgtagtagccggggaactcaccggagagcaggcggaggtagatgacgcggtcgggactgtaccacgggttgccggggaactccatgacggcattgactccaaccgcgtaagggtcacccttgagaccggcggccgcatcagtgccgcgacgatggccatgagcaggagggtgaggcggagatggggtccttactgctcgctgctcgacgtgggtcctccctctcatccatttctttttcatggtggtggcggcgggggagttgtggtgcttcttgatatgtgcatatgcacatatgcgtgccaatttgtttgcttgttgctgaattgagcagcttgagatcgtgatggttctgttcgacagggatggaaagtgacgaggagatattgtatgtgccgaagatgggtgtgcgcagcgggttggcatcgtccgggacacgaggctaccgcccacctccgcccccgctcccgcccgccgccgctgccgctaccgctcgagctacgcggattgaacctttgcggcgacgaggtgcgactgcgtgccctgagtacgattccggcgaccatcgagggagatggggctatcccgtcgcgtgggggcgctactagacaccacggccaacggcggtgcgcggcttttcgtcgtgacccagctcccttgctgccgtcgcctgttgccgcccacagccgtcgccgcttcagtgcctgccgccgctactcccgcatctccgccgctcgtaggccgccgcaccacacccgcgccttcgccgctcgccgcgtgtgggacgccgtcagcgaggagcagggttggaaatatttcagaaatttcggtcggtcccctccgaaacgatattaattcggccgaaatttttgaatttttgaatttttttaatgaatttgggtaatatttgttcaaattcaactaaattttgttcaaaattttggaccgaaatttccgaaattttgggatttaagtgaccccccatcaaaaccactaaaccgatatagtgaaccctggcgaggagaccgtggagctcagcccggcgccgccgccgccgccgctccagtgcatgccgccgtcactcctaagtcttcgccgctcgccgcgggagagagagagggagcggtgaggagggagaaggaactggagggaggggagagagagaagggacacgtgggtcccacaatttcttttgtgtcaataacaaataggtcccacgcatattttttttaagttctaaatgccacctaaacgccacgtgtaaaggagacccggtcaataccgccacgtaggcgccacgtcagcaaaaccgctctccaaaaccgcatagggagtcaaattgcaccggttttaagagtttgggggtcgagatatccggttttgtggtatagggtcacggattagatttcgataacttttgagggtcacaaagtgaacttgttccattctgaagacagcctcacagcccagcccaaactaccttccagttactttcgcatgatcgcagatcgcaccgcaaatcgtagcggacgaacctgacgtgtgcagtgagcagttgagtacaacctcgcacaagggtgcaccgctatttgcgttttcctactctcctattggcatggtggcatggggtcgttggctttgacttcacacatgctttcgccagtcaaagggctggccacccgccggcaccctctgcccatgttcgagcttcgatcgaccgacgaaatccaaggaacgacgtcattggcttcctcagtttgacagtttctttcttctccacaaacttgcctcatcgactaatatactaatagcacatgtatttattttttttcataacttcgtcttaatactatagcactacgtactcctccgtacgtatagacgtatagtgttgacaaaactataaaactagtatttccgaaggttctctgacaatatattttatatcctaagaactttacattttttattactctcactactacaaaagtgatttttctatacgaggctccttgatttttgcaaacggaccataactagtggcgtctgcaaaaatcgagggtcatttttgcatgtggccccttaagtggcctgtatggaaaaatcgatttttccatacgggccacttaaggaggcgtatgcaaaaataaaatttgaaaaatttgaaactagtgtatctcactcatatgcactccaaattagatgattcttttttctaaatgtttctaaaatcatcctctatcatgttattgtgttcttactgctattattttggccattttttcttgtgactttattttatcaattaaaactttgaatttcaaaacttcaaataatattttgaagcagtaattgatttcagctgaaaaagtcatcaacaacaaagttgtataacacatcaagatatataacttctattttggtcatttcttcatccgacaaagatttttataagattgatcacaaaatgtacatatctcttatagttttataaactatataagatatatgtacattttgtgaacaatcttacaaataactttgtcggatgaagaaatgaccaaaataaaagttatagatcttgatgatttatacaactttgttattgatgactttttcagttgaaatcaattagtattttaaaatgctgtttgaagttgttataattttaaattcaaattcaaattattcaaacaaagtcatatagaaaaatgaccaaaacaaaagttatagatcttgataagttatacaactttgttgttcacaacttttccatttgaaatcatttattgattcaaaatattatttgaatttcttatattttaaaattcaaattttatatagctcaatcaaacttggatggagaaatgaccaaaagaaaattggtagatctcaatgatctctacaactttgtttttgagaaccttttcacattagttcatttaataccacaaaattagatttaatgttcatttttatctagaagtctgatttgcctcctctccctctccaccacttcaaaatttcagcaaccttatctccaaccttatcttctcttatctcctctccaccattacttctcctcaactccctccccccctctctctctctccccctcacacacagcaagacgggcgggcgtcggcgacaccgaggaggcacgcggtggcggcggccgagggcggcgcggcgcgaggcggcggcggcaaggaggcacgcgggggcggcagccgagggcagcacggcgcgaggcggcggcacgcggcggcggccgagggcggcacgcagtggcacgcggcggcggtcggcgggagcgagtgatggggagacggatctagtgccggcgacgatggcgggcggcgtgagtgatggatccggtgccggcgacgacggcgggcggcgtggcgacggatccgacgccggcgggcggcgggggcgatgaatccggcaccgtgcggcggcgggctagggtttgggatattttggatttttatttttttttgtttgctgaatttattttcgcatgcggctggtataagcaaccgcatgcatgcggttgggccggccgcatgcgaaaagggtgatttttgcagaccttctctctcatgcggaagatgccttttgcccgtatggaaaaagccttttttactagtgtctgtccgttttaaaacactaaataaatgcttatagtcaaattggaataaaaagtgaattgcattttgggccatcttttattactaagtatctttttaattgttatctatcttttttttactttgaaataattatttttgccaattttagactactttggcgtttttgtctagccattatccaaacctctactctgacaaagatatgagctacacgtaaatagggaaaatcgtaggcataagaatgccaatgtgcttgaggttatcaatgcgctcgcaaagagggtttaagtggttcaaagtgtaaaaatatcaaaataagtaattcaaagcggaaagattggatatagtgtggtctaaattaaaacttcggtaatataatgtggcccataatgtaattcactcaacttttaaattagtaatagatccttgacgtaatttagtaagggtatgtttgttagagctccaatttctaaatttagcttcagtagttgggtctgaagtggagttgtgcagctgcttaaacccaagtccacctccgtagttcattttgtgaaagagctccacccaactcggctcccattttaggtggagtaattggctgagctccaactccaagagaggtggagctggagctagagctgtaccaaacagaccctgagttccaaagcttccattatctaaaaccaattagtaatagattaaaataattgtatttacatgtgaaaaatggtattaattgatttttcataaaaaaacattttcatgtagcaataattttaatcatattcaataatatatagttagaaatattaatgatagaacatatgcattagggatgtaatgctggaagtgttgagtaaaaaggaacatcggttgtatggaagaactatgccaaatgaatataacaatatgatgtttaacatacagagaaataaaaaatataatttattaaagttttcagttaataagggtttgtttggtcgatgatttattttatactacgcttgttttactgaaagtgtgctaagttccacaaagtataaccgtaagaatgtttgactaaaaaataaatgtacgatttatgagccactcgtgttagtagaggatgtccagtaaacaatcaaatatatggtactttaacgagctgtggcacaactaattaaggcttggcatagccatttttagctgcggacaagaatacaaacaaaattaggtcctacctgtcacgttcacaaaggcgttccaccctccaccgtgtagtactgtaattccttgatgttgcattgttgcgtgctcgataaccattaaccgaggacgcgggtaatgcctgtggcctgacagcgcttcatcccttatccgcgagctatatgcttctagggtgtccgcctaagaacatctttaatcgcctcttcaaatcttcatttgaccagtttatatagtagatagttaaatttatttttttgctctactaacaccttcattacactctctaatctgataatgggtcctatatatcaacctctccgttacctaattctttttcccttcttcctcacccttatccctcgtcatcttctcctttctcttctctattctagccgaatccatgcaaaagtagagatggtggaggccagggtactccttctatgtgcaccctttgccatggcctctgccttccttcaccattgcaccaccatggccatggtgggtgacgaagcctaggccatccacagcgagacgcgctttattctagggctcccacacgacaacgagcaacgatgctggggacgacaacagatcagactcgtcggcggtattgtagaagggagcgagcgactcgagatttgaatattgccgcatgtcccgttgattcggctcgatgcggtggcagggagcaatgttgggactgcagtggcggtgcccgtgctgcgggtccgacgcctttattggatgcgatgtcatcgcccttcccctacagcgcccgcaataggtcactgagccagcggatggtggcggcggcgatagtggcgaggtagagaaggagatgcgcgagcgcgcgagagagagagagggaggtagaaatagtgtgagggggctcaccattggcaagcgagtgtgactgaccagatttgtcgagtgaggggagagattcggacaaccagatagcttggccatacagttagagagacaattggaacatgatttttggttagaattgtcaaattttggcttgaaaagctatttgaagaggctgaagctatctccgtatttatctattcctcttttagaaaataataaaaataataaaaaatgatgtaccagtcgttcggtgtctctcttttgtggtttataatacccgtccataagatgagaactgtgatgcagaagttgacatggatcgagaacgatctgtaccggtcatgctacatgtacacgctgtattgtagtctatttattggcagggaatgcgagctgcacagtagactgtaggccatctagttacggtactcgcaagttgcagaagggccaaattttagctggagtgttttttctttaaaaaagaaaatctttagctggaggacatacgtgcaccttatggaatcgtggatggctgtagatggagtgcggggaatctggattcaccagttaagcccggttgataattatagggttggagcatgaccgatgagatttgtgcctggctggccaatggattgcaactattgcagcagcagcagcgatattactactcgtcttatttaaaaaatttatgtaaatataaaaaacaaaaagatgtgcttaaagtactttggatattagataataaagtaagtcaaaaaaataataataataattttaaatttttttaataagacgagcgatcaaataatacaagtaaaaactcaaaatccttatattataggacggagggagtgtgtcagcccccccccccccccccccacaccacacacacacacatgatcctgcccaaaggaggggaaatggtcacccgatgacttcaatgggtagatggcccctctgtgaacaaattgacagtaaaaataaacagctattattgtcgtagcatccgtagtagtcatccatctggtcaattgaccggatgatcgactttctgtacatctagtccggtgaatatctttttcatgaaactcagataactttacaatagtatataggagtattttgcaactactaccacggtcccagaatataataataaatataataatttttaaatgaatgtgatatattctaatattacgaatttagatatatgcatgtccaaatttataggtgtgtcacatttactaaaaaattattatattttaagatggatgaagtatctttcttcatatgaatacattgagtgcgcgaagaaagttttcaaaactgtggagtgtagtccttgaatgcacagtacgtatgaggccaccctcttgaattggggttctgcctgatcatttgatgaggacatcctccactattacccgctggcaaagacgtaaaagtcggactacgaccgtgtgagcctctgaataattccaccttgcttagattgggaggaggaagccaccttaaaagggagagccacccttcccctattgaattagtcttttagggagattgggcctttccctgagtgggtgtgccaaagaactgttgggatccaggcaacctaaagttattgggcctcggccaaccccacctaggccggattattatcatttggtatcagagctgggcccttgttaagggggtgcgaatgatgaggacatcctccactattactcgcaggcaaagacgcaaaagtcgggcggcgaccgtgtgagcctctgaataattccacattacttagcttgggaggaggaagccaccttaaaagagagaaccacccttcccctattggattagtcttttagggagattgggcattttccttagtgggtgtgccaaagaactgttggggtccaggcaaccttaagttattgggcctcggccaaccccatctggatcggattgttatcatcattggaccctggcaccctgttcaacattgaattttattatttttaaacctttttattataattattttaaaaatatatctatagattttttttttcataactgatctattagcaacataaaaaatagtgaatattgtacttatactctaccacattgctcaattgtcacctaagtagagtgaatataaaaaacatcgactcacctgtcacctatctctcccattcctctcgcataacttagtgatcctcctgctcagcgtagaggtgatggtaggtccaacattttagcctacagaacttaaggaccgggtctgagatgggttaggatgaaaatttatacattctgactaaacaatataagatctaagagttgtaaaagaacacatgggacttaacccattaccaccctgcctcaatgatgaggtgtgaccagcaactgccttaacgtgcttactttcatcgtcggtcaccgcttttctctccaaatcctatcgcaaagacgtgtagatgccacaaaatttggaatgagatcgagagactacgcatattaggacactctatggatgacaagcttgagggaggacagcaactttggatgaatgaagaacttgatggagaccttttccaccatgccattgcttttctctttccctcaccatcacagacgcagtcttgctagccacttgcatcccttctttagcctttggactgccagatccggtggcaatgagctcgtccaatccagtttttgtgaccgtgagcgtttcaagaccaacatcgatgatgtttgtgggcaccacacatcttcttcttggactctccgggtgaaaaacttatttcggatgcctggaacaatgatgatgatattcaagatatcgcagaaggcgtcgcattaaagtttttctgttggtgcaatatcctagagacggtaactctattagattgggttcgtttggcgattttaagatctggactaatgactgatttacaactcagtttatctacgacgctttcttccgatttggttcgacgtcagttcacctgtggtgatagacgtgaatttcaattgagaaaggatcaacacagctggtttcagatattctaatttgcatggttttagaaaaacaaagactacgtacaacatgtaagccatcggtagaaataacatttatacatactctcaccaaccattgaaggagaccaatgtttttaggatggtttccttactagttttgttgttattaatcaagatgtaatattgtaattcacggttatttgtcgtagaagctctgtaattgatgtaacttctctgaagtaaacaacggaatgaattctattgtcttgttctaaaaaaaatctattgtcttaaagaaaatcaaaccatgaaactagtcaaatggacaatgagcaacgcatgacacagttgcttgtcaatgtgctgtggccgtcctttatgacttttgttgtactccaatttcgcggataagtccattcggttacgtgtgatagagaagtctttctttctttctctgttcctgtatctctggagtctgcgacttcgggctataacccttgagttaatcgtctttaacgattcaacctgcactgtccaggtcggtatggaaactttgacggcaaaccaccatatgcatttaccatgctgcagtgtacgtacagatgtacagatctgcaaccagtttggaaacacgtgcgtaacgacctgaatgtatagattcagataaccgtgaatcacaaacaacatcacgatcaactctgtagagtgtaccatcaaaattttgcacctagattagtttggattacgtctcttcgaggtaatctgaaaggcctccgtcccaacacttaagggcacccataatggttatctatagactctctataagagatccatgtcagtatatttttctagttggaagagattaaatgaagagagagagcaaagctatttactaacctggagatagtctatagagaaaaacgaggcaatgtattagagagctatagatacccatgtagacatactattgagatggtttactattaatctaatctattgctgagatgtacatgttttagatagcaccttactttaccattgcggatgctcttatgtagccgagtgccgacagatcacgaaaggatagcaaaaggcaccggcagggctgcagcatgaatgcacctaacttcgcagagcccattcggcatttctccattctacacgaacgtggtgcgcacgcagagcacatgccccggcgcggcgcggcgcgcatcggcgcatgcgctgatgtgccgctcgctgcggctgcgcaagcgcaggcgcaggcgcaggcgcaggcgtacctacaccacgctggcgcgtaaaatatcctgcacgctgcacggctgattccagatttccagtaggtgggccataggctgctacggtgctaccgccacaacggatcggcatcaagtaatgctaataaacaaattcaatacctccatccaagccaaatcccaagacgttaaccacttaatttgttcataccacccatcttttttttttgaaagtgagggaaagatgttgactttttcataccacaaacacaaatattgtttgctttgcggcatttcctgcagctgcactataaatacgagttgtccagcgcccatatcacgtacaaactcaccaattcgaccacagtcaccacagatcttcttccttcccgagacgccaggaaacgccgggagaaagcatgggttctctgggagcagcaggtaagccgcacgccgtgtgcatgccgtacccggcgcaggggcacatcaccccgatgctgaacgtggcgaagctgctccacgcccgcggcttcgacgtcacgttcgtgaacaccgagtacaaccacgcccgcctcgtccgcacccgcggcgaggccgcggtggcgggcgcgccgggcttccggttcgccaccatccccgacggcctgccgccgtcggacgacgacgacgtcacgcaggacatcccgtcgctgtgccgctccaccaaggagacctgccttgcccccttccgccgcctcctcgcccagctgaatgaccccgccacgggccacccgcccgtcacctgcgtcgtctccgacgtcgtcatgggtttctccatggctgccgccaaggagctcggcctcccctacgtccagctctggacagccagctccatcagctatctcggataccgtcactaccgcctcctcatggaacgtggccttgccccactcaaaggtgagtacgaatttctctgcgtacgttaatgcgcacgtcaaccatttctgctcggtcatatcggcacctgtcacgtctgcatgcatgcatccaccttcgccgttgagtgcgtcacacagtaacaaaaacagcttacacatcttgttgtttgtctcggcatgaacagatgtcgatcagctgacgaatggataccttgacacgccggtggaagacgtgccggggctgaggaacatgaggatcaaggacttcccgagcttcatacacacgacgaacccggaggagtacatggtaggctacgtcatcgaggagacggagcgctgcaaggatgcctcggccatcatcgtcaactccttcggcgacctcgagggtgaggcggtggcggccatggaggcgctcggcttgcccaaggtgtacacgctcgggccgctgccgctggtggcgcgcaaggacccgccctcgccgcggcgctcgtccatcaggctcagcctgtggaaggagcaggaggagtgccttcagtggctcgacggcaaggaggctggctccgtcgtgtacgtcaacttcggcagcatcaccgtcatgaccaacgagcagctggtggagttcgcgtgggggctggccaacagcggcagggagttcctgtggatcgtccggcgcgacctcgtcaagggcgacacggccgtgctgccgccggagttcctggccgagacggcggagcgcggcctcatggcgtcctggtgcccgcagcaggacgtgctgaaccaccccgccgtgggcgcgttcctgacgcacagcggctggaactcgacgctggagagcttggccgccggcgtgcccgtcatcagctggccattcttcgccgaccagcagacgaactgccggtaccagtgcaacgagtggggcgtcggcatggagatcgacagcaacgtcaagcgcggcgccgtcgcgtgcctcatcgctgagctcatggaaggtcagaaggggaaggagatgaggaggaaggcggaggagtggagggagaaggcgatcagggcggctaagcccggcggctcgtctcaccgcaacttcgaagagctggtccgccacgtgctcctggccaaagagtcgtagctcctcgcgtatgatttcctttgcgctagtgtcgttgtcatgagtgataagccatgaggtgatcagtgttgtattgtgtatttgtggctactggcctactgcctatatatactggatggtgcaatatcaccctgtttgatttacattgttcagcctattattgtaatggattatctactcattattttgataaatttagatatttagaaaatagcttcgtcaaactagttgtttagagaaacgtccaggggtcttccggctagctacacaagatggtggctagacgacctaggttcgaagcctcaccccttcaaattatttgatattaggtcattatctaatattcgcgtcttttttcaaacaagttgtttaagtaatgaaatagaaacaatacagtagaagaacattttttttagaaaatacgttctcctgaagcgtagagcaaattatttatttcaataatttgctgaaaaatctaaatgaaccggaaatgcataggagtggtcgatcggcaggaacctaaaaatgttgattttaaaattttgtggaccatgatttgctcacagtggaccaggatttttatcatgggtatgccccaaaaatctcaaagccatataaagagtctattatgcacacaaatacaacaaaaatgacttgaatttatcaagagcatggtataaatagcatctccatatatagttatcttgctaaagaaaggaagaaaagaagtgcacacgtgctttctgcttcatatgtgattgtttcagttaatctaggtcgcaaaaacatgccatctttgcgttcgcgaaaaaaaaaaagccatctttgaacttcttggtttcaaatttcagttctctatcttatttgcggggaaagcaggtaggcaggggctcacctcttacagctgcgtgctgcactagactccgtttcaccggctgctgcagcgcgccgtcgtgctcgtggattcactgatcccgccgttgtgctcgcggattcggtgatcccatcgccatgacacaaacaaaaacgacgagacaagagagataaactaactctactcgttatctgtgcgtttagacttcctgccttcctgggcttgtacttttgctgcgacgaggcatcatcaaatcatctttttttttttgaacgaatggcatcatcaaatcatcgatcgatcatttacgctcatcgctcacaccactcgtttaaaaaaaatgcgattttttaggtatgcctgtgcccacgcggaacccccttgtccacccctgattgcttgtatgatatggaaaagaacgctgatatggtggacattcagggttcaaaatgacgtacataaaattaagtgtaaggagattttcttgggaaacagttatagtacctttcttcttcttctaattagagttagcactgtagcactgtagtaatatatcggaagaaaaaaagttagtagctgaacacggaccggccatgctactcttaggccctcttcttttctccaacaaaagttgaataaagttttgatactcatgaccgcttctcaaactgctaaacggtacgtttcatgcaaattttctatatgaaagttgttctaaaatactgattaatccattttctaagtttgtaataattaaaacttaattaatcacacattattatcacctcgttttacgtgaaacacttaatttttatctttatcttcaagagatttaaacaccaccttaatagctgaagggtatgcctctatatgtttacacacccaaaatctataactaatataaatatttggatttttccggtcgtcacattacgccttcgtccatctcagcccgcttttgtccgttaccaggcaagcctcccctctgttgcccttcacccctgcaaatcctttgtccatctcaatgttcttttccactcaagaagccaaccgaatcggaagcatgaacacattagatccaagatctaaaagtccctaaaaaatccaatcgtcacccaataaatttttgtccgtaatccaactaagcagcaccttctgtccctgcacgcgcactgcgttcatcgcgtatgccagtcaaagcaaaaaaaaaaaagaaaaatcagagatcgatacgggcaaatcacaaaatcaaagatcgattaaaaacccaatcacgacaaatatcatccagagtccgtatcaaatctaacccaaatttcctcccaaacccaatcatgtgaaaaaatcgggtcgaaagagacaactttatggtataagaccgattgaatccgaggagaaaaaaaaagagaaatcgagtcggagaaggagaaaatcacatatacactcgatccggtggaggggaaaattgttgtcatcttcaactggggtgttggccagggagaaggagaggagagcccccgatgaactctcacccagatccgcgccgccgccatcgagcttgccgtcggacgagagtggtggcaccggccaggggagtaggagaggacaggccctgacgagctctcgtgaggaggaggggccgtggtggtggatgtggatggagaggcgagcgccgacgctgacccctggacgccgtcgacggctcgcgtcgcgagtcgcgcgtctgctgatggatcgatcctgtcactgccgcttggggagcgaggtcgctggagagggggacaagcagcagcggggtcacctcgtgggacggtcttggagacttggtgaatggtggattcggctgagtgttggagctggagagagatgaggatggagagagaccgaggctgtgtttagatctaaagtttgatccaaatttcagtccttttccatcacatcaacctgtcatacacacacaatttttcagtcacatcatctccaatttcaaccaaaatctaaactttgcgctgaactaaacacagcccgagaaaaggggtggagttgagaagaaaaatatatggagagagaaccggaggtaggagaaaatggaagggatggtgaccaacagctcatgcacagcagaacaggtgcctcatgcacagcagcacaggtgcctcctgactattttatcatttttaatttattgatattcttaacttaaatatatgctgagataaaaaaaataatcaattgtgaaaaaaatataatttttaaaataaaataaactgcaaaataattaataacatgtcaattaaacttacatatcttaactaattaaaagattcgtaatttttcgtttgtcacaggacagacgaaggctgccttcgtccgtcgacactgcgccttcgtagcccccaaatctcaatcgcttttagaatcggatacagggaaacacttcccaaaatcggcacaaccaaatcggatgcaccaaccactaggaaaaaaaacaagactcaaccactctttgccccaaaaaaatcaaccagaatcatcacaaagtcacaaaataatcgtccaagaagaacaacaatatacatcacaaaacttcactcacctgccgtcggatctgccctcagcaatcgccaccgcggcccacggccattgccaccgccgccgccctcggccatcgccaccaccgtaggatccatccgcggccgccgccgacgccaccaccaccgctggagggagaagagaggtggcggagggagctgccgctgctggatccgcacgcggtcgccgccactgctgacagatccaccagtggacgccgctggatcagccgcgggaggaaggcgagagagggcggagggagccgccgccgctagatttgcccgtggccgcggccgccgccaccaccaccactggcaaatctgccttgaaagggaggctagaggaaaggatggagccgcccctaccgccaccgccaccgccaccgccaccgctgctatatccaccgcgggagagaggcgagagggagaggaggagggggcgagggagacgagacagggcgaagggagcggtcgccggcgagggaggcgagacggggaggaggaagccggcggctctgtcgccgccgccgctcgcggggagggaggaagggcgccgccgcagctgctcgtgtttagggctccggaccgtccatttgatcggacggctctggcttttcccgcatcgggccgccggactattgggcctccaaatgggccgcgactaaaatcaatgttttctctaattttaagcatctttctattttcagaaatagcattaataccattttaagtttttatgactgattattaatttagttccaactaaattgaataaactaaaaatttgtctagatttttctcatgatatggatttattttttgactaaaaattaattatttatttgtcatgatatagattttaaatttatactaaagttaaataatattaatttttttaattctatatggactatattcttcttccaatattcctattttttttattgttctaattagttttctatatggactctaaactcttctttcaatatttttttattttgaattttaattctttttctcaattgtattcctatatgtactctaggctcttttggagaatattctagactcctcatccaatattatttattttataatttatactttataatctatccagtttaggttttttttttggcaaaagatttgttttatgcagataatccgattggacaacgtgattttttttagaaaaatgaaagagtccttatctacgatgagttctgcttatttttatattttaatcaattaatatgagaatttctagatcataagagaaaatgtggatgctcatttttctattactttactaagttaataacattagtttttcccgttgtaacgcactattgtataataatttattatgagttactatatttctttctatcatttgagactatttctagcaagcaaaattaccaaatcactttgaaataaattcggttaaaaacaaacatttttaattttaatacaccatgcttcgcacgggcattttgctagtacagtacagatagctataagaaagtttccaactaaaaattaagatacacagatacacccactgcagatgactgagggaaccggttttgtgttgagaggctcaagtgacgcatacctaagggacatgatgtggacttttccccacacaaaatactgtttcagcacagaccatcatccagcccaaacaattctaacggcatcggtggggctttttaacacggaagaacaggcccttcagcataggcccataacaaataatagaagaccagaacattaaacaactcaacggactaatgctctgagaaatacgaccaggagttgatcaaaataggcattgaccaaaatttaatttgaaagaattagcaggggccgcgcgaacgcgtaccccctctatcacaaattatgacgtccactctcccacttggggagatggtaagccaacgcgcccaccaagtgcaatgtggggcattggcctaggccacgggcccttcttgatcgcccgttgaccccgtccaggtaagtatgttgcaacggagcaccagccgcggattatataggaacagctcccacccccatcacctcgaattgtcgaggtggtactaaacgaaagcatatcgtcgtgcaggcttgcagccgcctggttaggcctacattgtgtgggccttgctttttcgatgggctttctctccggactccgtagtggcgtatggactgacgggctgagctacagaatccaccgtaggcccaacactggagaccgcctgacgagttgctgaattcatctcaacaaaaatagaagggactgtctaggttgctgaatttgatttatctgatttatacagaaatatgacataagcaatttcttcacgtagcgtcattacgtgctaggtttgcgcctgccctctcttcacacgcttctgtcgctcgtgagacagagaacgcagcgtcatggaatattatctcccggaaagataacatcctttcttacgtaccaatctgaaccagattaccagaataaaaatataatatactcctatctccttttaagatctctatatatacaggggcaaggtgagatatttaagattggcttactctacttatgtaatacttttaagggcaaaaggaaggatacgggtgttatacatcatctcacgcttctactgttatgcgatagaccaggaacatatcggtgatccgctaattctgaagataccggtgatatttctatttgaaaaaactgtcagggcaaccctgcgtcgtcgtcgctaccggccactgcacggcgggcgcggggggacacctaagcctgtgcgccgctacagcggaggcccgacaagaacaacgcctctgcaggtgcttccaagcgcggcgagccccatacgtgagagagaggggccgcaccgcaccaccggggggacacctcaattaataaacacatggcgagaaaccggaaatcgtaccgagatacggtcatcgatcaggttcaaaaacgtgatccgccaccgtgcgccacacaaacgcacctcacgcaagattacaacgagaccacagggcaatcaatcaatcatcacggccggtccagggctccacggcgagcgcagcctgctgctttttcggacgtgttcgagacccggtcaagggcgctaattcagatcgccgctgtacgtgggggcgcaaaaaccttgtgacgatgggattcagagcttcatcagattcatcagagggtgtcacatgcagccatgcaggcttgccctttgcctttttaacatgccatgagcagagcattacttctactactagtagctaggagtactacactctactctacactgaatttactgctcccaatcactcttacatgtgctagttaaagtgttactcaacacaacaaaaatatggcgatgaaaaactgtggttgcagccttgaagagtggagagggagcagagcagattaactaaccaaaacctgaccatggaggatgatggcctgatactcatctactggcatagtagtacatattcagattacagaggcggagcgccgtcgagaattgagctaagtagactgacatctaggggtcgaagaggcggccggcgcagcggcatttccaacccagcggtttgtagttggagtactgcgcgaacccggcgacatcaactcggtcggcggcgctcgccgggcggctaacccccggcagcgccgccacctggacgggcgtgcaggggttgcacgcgttgcaccggttgtggcagctcggcggcgtcgaccccagccgcgacttgtcctccgctaggctctgcacacagcaagcgcaatgcgcttcaggcgcgaacagaagctatgcagcctacctaacgttcgtacgcctgaaacaagcgcgggtgatagctgcaatacctgagaagaagacagcgtcgtgctgcggatgccggctgcagctccgagaaggaagctcaccagaatcatggccactaggaatgctcggtgaggtgatctcacggccatgagaccatctcgttacagccagctagtctgtattggggagaggttgccgagaagagtgaagcctcctgaacagtaaaagaaaagagaagcttctttgtgaagcagtgagattggacagtaagctagctgctagcttcctccatgcgtcaccctagattagtagagacgacgcagctagctagctggttctccttggagctaaggttggagatgcgcagcgatggcggcagaggaacgtaagagaggagagtggtcagtggcctaaacgagtactagcaaatttgcgaagtgggaggaggaatgaaacgacatgggcaaatgtacaaatagagggggcgatgctgcagagtggaggggcgcagcaaggacagggccgtgaccacgcctcgctgctacatgtttacctatcacagcatcactccttggcgtgtaaccgcagagacccgcacacggcttgtagctagtgagaatctaccagctcatatatctctccttcctgggaaaagaattgagccggtttctcggagcgaaggagaattcggaggaggggaattgaatggcgccataacaatcgctctcattttgggaatatggtccggtttgacactttgaccaagtgagtgagtgagtagcctgtcacaatgaatgagctagcatagcatcccggatgaacacaatgccacatcacgataaggaaaggtcgaggagctagtggggttaacattacaggactgataggtaccggacgagcgggtcgaatttcactgtattttcatccctgctaatgctagcggctagtacttgctactcgatccaatctcaatatggccgctaggacagataggaatcgagtatacggagctggagaacagctcatatctgttctctgaattctgatgcacacctctgttctcctctgatgcatatgcatggtccaaattctccgtggcagcaaaaccgaagtagacagacgtcggcttgaggagtgagaatgggagatgcattacatcttaatcaaccatggcctggtttagttcctaattttttcttcaaacttttaactttttcatcacatcaaaactttcctacacacataaactttcaacttttccgtcacatcgtttcaatttcaattaaatttttaattttagcgtggactaaacacaccccgtatccatatgtgatcaccgaacagttctcagcgatatagcgatatatgggaggtcgcatcaaaatgcggttttcacttttcagctgccaatagccccggtcaatggcgtgtacacggtgtagagggtcaggaaacaggagtacccaactcacaagcagcgccgagcaggaagaagaacagcaagcggtcaaacgccggaggagtagggcggccgtgccgttggtaggttggcagcaggcgccggcaaggttgttaggatcgggatactagtatcgttttagtcaaaataatatcgtatcgtagtattgagatactataagatttttcttttttaagtttaattaatatttatattaattatatacagccatataaaaaaatatagtaatgatatatgtcatgcaaatagagacatttatcaagagaaaccatgttgattttgatatatttaattgattttcatataaatttgagcatatttagttacaatattttcaaaccatgttattttaaataataatttgtagtatcgtagggatcgtagaatcggaataccacctaagatttcgtaggatcgtgtagtaatgaatagtagggtcgagatactatgaaaattagaatactagatgggatcggtatcgtttcggcttggtaggatcgtagtatcataagatattaggatatgaatcgggatactgacaaccttgggtgccggttgagaactgaaatgctgctgaaacggagggaaaccacggcctacgaggtcatgtacgtacacgccgtacatagttggatccatcaaacgttcccatcggcattaaccgatctccaagacccctgtgaagaggcgtacatagctatataggcgaagtactgaaccggtctccaagagaccaagacccccggtaagagcgacgaccagcgtccaccgtgatttcacagtacacgcagagcaacatgcaagtatgccactcagccactggttgtgattgcaggaagtgaccaaagtcttgcagcgacaatacgtgatgatctatctagtccaattgcatctcggagccgcacaacgtgggtggctgcaagccggcaacgatgggctgctcgcacgcagactgtgaacacggaggggctattaacttcagtctctgacatggtgtttactattcattgttcgatggattcggtttgtattgtatcatgggggcaatggattcaattcgccattacaccctctgttctttgtgtctggatatcatcagtagcaaaaggctgcaccctcgcttgcttgtttgatgaagagatgggacttttccactagaactgctaagagtaggcaaacaatactcacagaatggtgattattgaacgaagaaggcagagacactactcgccaattgacatcctactgcaggtctgcagctagtactaatatgctacgccatggccaaaaatctcttaagccatatacagcatgggctaacggcggcgcaccggatcaacttgtaactgttagtgttgtctattggatcacctaggtttagatctagtcgggtggttctatttgcgatagatgaacaacaatggatgaataaacaagagggagtgagagggtttagggatgtgaccagtcgttgttgaggaagaagtgcagccggccatcgtcgttgtcgtcgcgggcttgacgtggacggcggcgacgatgtgctcggcgacgatggcagtgatgcggttgcagcagcgacggtgtcgacgacgaggcgtggcgcggcggtggacttcccgtcactgactgcgcccccctcgagatcggtttagggtttatggggtggagtggcggcggcgacgaacctcgtgtcttgtgtcgtcccgtcctccacccctctttatatgcaacagtgtgacgggggcccaccagccattgggctgggcgcccccgatcagggcgcgggtcaaggcccccttgagcccaacggctcaaggggagggagatctatctaacaatctcccccttgatctcactatttcttttagctttttctattccatcacagatttacatatagagcatgtttcatcgtcacggttaattaccgatggattccacagccactatacacatctctattcagaaacagatactttaacttttgggccctataatgcaggattcataaggcttcccttaaacccatgcatgctacatgttccttgaacatgttgggaggttggcctttcatgagcggatccgcgagcatcctttctgttctaatgtgcttgagattgattgtttgatcccagacttcgtctttcacaacatagtactttatgtcaatgtgtttggcagcaccacttgactgattgttgtgagagtacattactgcgggttctctatcgcagtataactttagtggtttctcaatactgtcaaccacctttaaaccgggtatgaacttctttagccagttcacctgccccgttgcctcatagcatgctataaactcggcatatatagtagaccctgcagtgatggtctgttttgatcttttccatgaaatagctcctactgccagggttaacacgtatcccgatgttaactttgtattatcttttgcaaagtcagaatctgaataccccactatctggagcgattctgattttctgtaagacagcatgaggccttttgttctttgcaaataacacaagactttctataccaattttcagtgcactgggcctggattactttgaaatctgccaagtaacccggtaacaaatgccaagtcaggtcgtgtgcacacttgcgcgtactgtaggcttcctacagctgacgcatatggctttgttttcatttcattgagctcatactgatttctgggacattacgatgccccatacttttcgcctttgactataggagcaggtgtagcactgcatctgttcatattgaatttcttcaacaccttttctatatatgccttttgagaaagtcccaatgcatactttattctatctcggtgaatctctatgcccaaaacatataaatactcaccgaggtctttcatgtcaaagtttgaggacaagaatttctttgtttcctacagtagactgacatcactacaagccagtagaacgtcatctacatacagaattaggaaaataaatatcccattcttaaatttgaatcaatacagttgtcctcgatattctcttgaaaacccaaaatttctttattgtcccatcaaacttcaagtaccattgtctcgaagcttgttttaatccataaattgatctcattatacggcatcccatattttcgtttcctttcatgacgaaacctttcggttgtgccatgtatacttttttcttcaaatcaccatttagaaattctgtttttacatccatctgatgtaattccaagtcataatgtgccactagtgccgttataatcatgaaggaatctttacaaaagactggagaaaagtctcattgtaatcagcccattctctttgcgtgaagccttttaccacaagtcgcgctttaaacctttctatattccctctggagtcatatttggttttgtagacccatttacagcctactgttttagctcctttaggaattttttctaaatcccagacatcatttaatatcattgatctcatttcatctttcatggcttccaaccattcagatgagcgagcgcttctcatggcctcttcgtatgaggtggcatcatcctccatatgcgactcttctatattataaacatgatagtcatcacggataaccgatcttcggactctttcagaccttctaggggcctccacatttggcacattatctgtttgagactattgcagctcctcctctggtgtggcaataatttctgttgaatcctgtaaaacaggttcctcactttcattcattgttgccataggagagataacaacaggtgttggtaccgcaacggcatgcattgctggcacaacatcagtaggtagagagaagaaaggttcctaagtagacggagcgggtacagacacccgcctctcctcaagatcaatttctcgaactaccgagctccccctaatcatttcatcttccaagaagacggcgtgtttcgtttctttaaactttgcacaactgtttgggtagtagaaacgataactctttgatctttcagaatagccaataaaatggcagcttactgttttgggatccaattttccaaaatttgggttaaatactttatcctttgcaagactcccccacacacggaggatccatagctcatacggtgttttgggcaccgatgcattctatgcattgtatgcattgttctaaaactaagaactccaatggaggaagaattatattcttaaccagtctctcaattctccccctcgaaatatggcctaaacgacagtgccataatttcgatgagacatcaagagttcgctttcttttcttttgtcaccgaggacacaacattcacattctcaaaaagagataacaaataaagctgattttgcaacagagcaagaccaacacatgcattattataccatagttcacatttgccatttccaaaatagcaatcatatctatcaaaatccaatttggatacttctttgcaaagaagggacataaaaacatctggaagtaaaagtgtgaagccattcgcgagctctaggcaaagatctccaacagcttcaacttttgcttcaactccattggcaactctaatggatatttcacttctttgcgtagtcctcattgaacggaatccctttaaacaattacacacatgaatagttgctctagaatcaatccaccatgtggatctagaataaccaatcataatgagattcatttacaaatgtaataatgttctcacctttctttgccatgatcactgccaggaagtcaggacgatctttcttggaatgtcttgtcttcttgcagtggagacactgatcctgtctcaactgtaaactgttgttgctaaggcagatgctgaggctgtttagcttttgaggagggtgacctctggctcttttccttgttatctttaacaaggttaatggagccaccattggtctctttgagtctttcctcctcttgcacacaattagagatgagctcttcaagattccatttctctggacttattttgtagttgacaacaaggttgtcaaagttctttggcaatgaggacataactagatggaccaaaaagtcatctgagatgcccaaaacttttttgcttcaacttagaagccatgttgctcatcctaagaatgtaatcttttacaccacctccatggtacctctctgtcacaagctgctttatcagttgtgtcgcatgaaactttgaagaaccagtaaactggctctttatactttcgaggtaattagagacggtgtcatactctgggattgagcccaatatggttggctcaatcgtgttctttaccgcagccaaacagttcttgttggctaaggaccatttcgcatgctcaatgtcatacgacatgatgagggaagcattgtccctctctctcttttgccattcagcatctgactcattttcacatctgaaaaagttcagcaggttctataggacatggggtagtcaacacccagtccacttctcccaagataaaagcaaggtcgagttctcttttccattcttcgtagttatctcctttcagggtcggaatatctttaatgtaacccatcaaggagtagccacctgatatgatcatgtattgtgagaacaaaattcacattaaaatattttgtattaagtctacattaccgttgggcaaaaaatagacataacacatagaaccataactataacattgcaattatcaacgttggtcagaaaaattacaacatcatagcacataattaatgttcctaaattaaaatctcccgttggttcgaaatttaattttagaaacactaattttcatcaatttcatctatttgcagcggaagatctatatacaattcatataaattgtaacaaaactctgttgtttactctctgtaaaaattttcccgttggttcaaatttaaacagaggtaaaacatgcaaaaacaattcaaaattctattgtaatttgcatgaaaatatacaaagtacatgttcagaagcatttctcacatttatctattctctaaacaattttcacgttggttcaaattgcatagaaataaacacatttaataactataattgtaaatgcttctgaaacaaggactaaaaatagactccttttctttttcttttggccccgatggaccaaaattggacttttgccggcccttttgcgcgcgcgggcttccccctccccccaggccgcaacctaggcctgggttgggaaagccccgccacgcgcctccttcttgggccaaaacaggcccaaccatcgttggccgtccgatcgctagggtttcgatcggacggccgggcgcctcttttggggaaacaaaaacccccacccccccaagccactggccgaaaccctagccgtgctcgccggccgaaaccctagctgcggcggcatggcgcggcggcatggcggagcgacgcggcggccggcgagcacggcggcgcggcgccggcccttcttttctctcggagctcgagcgggcgacgacgagcggcggcgccgctgcacatcctcttgccggtgcgcgcactcgcccgagggggagtgcgccgccgtcgagcggtcgtgctgcggccccggagccgtctgccctctccatctcttgcgcgcggcgtcgaggacggccggcggcatggcatgactcccgcgcgcgtctgcggcagccggcggcggcggtaggtgagtctcttttctttttgacccgtgcggatcgtgtgctgttcttttctcttgatctttggatttctttcttctttgtggatgtctatccccgaatcgatctaaaccctagggtcgctctgataccattgttagtgttgtctattggatcacctaggtttagatctagtcgggtagttctatttgtgatagattaacaacaatggatgaataaacaagagggagtgagagggtttagggatgtgaccagtcgttgttgaggaggaagaagtgcagccggccatcgtcgttgtcgtcgcgggcttgacgtggacgacggcgacgatgtgctcggcgctgatggcggtgatgcggtttgtagcagcgacggtgtcgacgacgaggcgtggcgtggcggtggacttcccgtcactggctgcgccccctctagatcggtttagggtttatagggtggagtggcggcggcgacgaacctcgtgtcttgtgccgtcccgtcctccatccctctttatatggcacagtgtgacgggagacccaccagccattgggctgggtgcccccgatcagggcgcgggtcaaggcccccttgaaccgttgggctcaaggggagggatatctatctaacagtaacatcttatccattcgcgccgtgtattactaagtgattgtttacaagttcgagcggacgggcacaacaaactcaggtacaattgcggcacgaatttaccgttttcttgagattttcatggtagtttatatcaaaaaactagaccttcttagatgggcttgctccggttgatttgctggtaggatatgttgggctgaaaagatgacctctgttttcatgggctagtggcccagtacctcactgcgttcgacatccctagtatagcccagagtagtaatttggcccacagctatgggccgaatttgtgccgattagaacgaacaaagtgattccattactttcccaactcgtatgtacaacttcccaagcgtacaggtacagaacacgtaacgtgtccggcactatggattacacaagcgtgtcgcaggaggacgttgcgggattgtacaacgccgggagcaggtacttcctcctgttcgcgccgttggcgttgtagctggctccggtggtggcgtcgacgaggagtttaccggcgttccccgggtacgcgccgctgccgtagactcccgggcacgccgagcacgcctccagcggcgcgtcctggggcccctggtagaacccatcgccgtacgggttggtcaccgtgccggccaccatcgaggcgaggatcatcaccatcccgtccgcgccgacgtcgttgttgggcgccaccagcggcgtgccctgtggcccgtacaccggctgcgcgaacggccacgcgcactgccccgggcactgcttcgcagagttgccgacccagatgtgggtggtgccggcgctcgcgtccgagccgtgcttgccgcaccggctgctgcagaagccttcgacggtgacgtcctcgtcggtgaagacgagcgcgacgcctcccctcttggtgccgacgcgcgcggcgagctggtcgatctgagccagggtgagagacttgccgagggagcactgctcgtccgagacctgctcatcgaggagcacgcgtgtggaggtctggctgttcgtggcggcgttggacaggtagagctgttcgatggtgccccaccactgcccgaccgacggcgtggccgcgttcggcgcgccggtgagcgagacgacgaagtcggcgatgatcgacatctgcgtcggcgtgaatttgccgtaccagaggatggacaccgggatgtcgccactgagcacgctgccgtggtggtacgtgagctggtcactcgccggaggtatgtacagctccattaacctcctgctccccatggagagctgcacgaggctcagagacaccgccgctatcattagcctaaacgaagccattgatcgcgatatcgcacggccaaaatggagcactcgtgggatcgagctagctagagccacttgatgatcgagctcgtcgtgtaattgtgtttgcttcccttgtggtgatggaaaaggctgtctccccgctgcctatttgtaggccaataatccatgagccatgggcccgtggtgatctgcttgacttcggcgatggttcgttcgatcatatcctgcgcctacttgcggttgcaaccgggggcagaatgcatggcgcggcgggcgggggacagcatgagctgtgctgtaccgcacacgcgcgccaccgtgtgtcgctcgccgcgccccgcgctgtccagttgcttctgggcacggttccagatacgatgccgaggcgcgcgagtcaaaatggcggagtactatatgttggaattaatgaatgtgccttagcccactcgaagattaattctttggaaaatcacaaaagccaacctcatgggatggcatgcatgtgtagtttagtaccaccttgcttattctaggagagggggacctccttaaaagggaggatgccctcctagccacttgaagcatgtgtggtggagagaagaggggaaacacacgcgcgcgctcgctcgcctcgccgggccggcggcgcgcgtgcacgacatacgcgtcgaatggtccgaaaaattggctcctcacccttgcgcagatgcagcctccttttgcagttttgttttggaaacgttccgaaagatccggtgcgtgcaaacggcgtggagtccggataagttacgcgcgacttatccggttcggttacgcgcagtagagcgccgtcgctcgtagactactccatcccgctcgccggcgtgcaccggcgatcgggagagcaggtctccggaacctctgccttcgacgttctgcaccgggagaaggcggcaataaggtttttgggaagcgcttcgcgcgactgctccctgttcgttcgcgacggctcgccttcctcttcgctcgcgtgtttcgtgccttcgtagacacttgcgaaaagtttcgaccaagcagccggtctttccgtcacctcggtacgtgttcaatatgttgcgcatatttgatttgttcatgttatactgtgtagtttatatgtgtagatctaatgatgcgttcatgctagttttcatctgtaatgtcatgattcatttatggaatagattaaatcattatatatctataatctcaacaatccaaaaaccttattataggcactgtgattttactatggctggttttgccgatgcactgaggccggataaattaaccggtgtgcattttaagagatggcaaatcagggtcactctgtggctgacagctatgaaatgcttctgggtgagtactggcaaacctgaaggagttcttactgctgaacagcagaagcaattcgaggaagccactactctctttgtgggatgcattcttagcgttcttggcgatcgtctggtcgaggtgtatatgcatatgaccgacgctaaggagttgtgggatgcactgaatactaaattcggtgctactgatgctagcaatgatctgtatattatggagcagtttcatgactacaagatggctgacaaccgttctgtagtcgaacaggctcatgagatacaaaccatggctagggaactcgaactccttaagtgtgtcttacccgacaaatttgtggccgggtgcattattgcaaaactacctccatcttggagaagtttcggtactgcactcaaacacaagagacaggaatactccgttgaggggttgatagcgtctcttgatgttgaggagaaagctcgggaaaaagatgccgcgtctaagggcgatggtgggcagtccagtgccaatgttgtgcacaaggcccagaacaagagcaaggggaaatacaaagctcagcagaccaccaacttcaagaagcagaagaagaacaacaacaatcctaatcagaatgagaggacttgctttgtgtgtggccaagttggtcatctggctaggaagtgtccacagcgcaaggggatgaaggcacctgcagggcagacttctaagtctgctaatgtgaccattggcaacactggacatggaagcgggtatggtaatttacctactgttttttcagttaatcaatctactaattggtgggttgatactggggccaatgtacatgtttgtgctgacatttcattgttttcttcttatcaggtcgcacggggttccaccgtcctaatagggaatgggtcacatgcttctgttcatggtgttggcacggtagatctgaagtttacttcgggaaagatcgtgcagctgaagaacatgcagcatgtcccttctatcgacaggaatcttgttagtggctcccgtctgactagagacggatttaagttggtttttgagtctaataaagtagtcgtgtctaaacatgtatattttattggtaaaggttatgagtgcggaggcctgttccgtttttccctttctgatttctgcaataagtctgtgaaccatatttgtggcagtgtggatgatgaggctaatgtttggcattcacgtttatgtcatattaattttggcttgatgtctcggctttccagcatgtgtttaattcctaagttttccattgtcaaaggttctaagtgccatagttgtgtgcaatcgaagcaacctcgcaagcctcacaaggctgccgaggagagaaacttggcaccactagaactcctacattcagatctttgtgaaatgaatggggtgttgacgaagggtggaaaacgatatttcatgacattgattgatgatgctactagattttgctacgtgtacttgttgaaaacgaaagacgaggctctagactattttaaaatttataaggcagaagttgaaaatcaacttgacagaaagataaaaaggcttagatctgatcgtggtggagagtttttctcgaacgagtttgacttattctgtgaggaacatggcatcatacatgagaggacgcctccctattctcccgagtctaatgggattgctgaaaggaagaaccgcacactgactgacttggtgaatgccatgttggacaccgcgggactgcctaaggcatggtggggggaggcattgttgacctcaaatcatgtgttaaacatagttcctaacagaaataaggacaaaacaccatatgagatatggattggtaaaaaaccaccactttcttatttgcgcacatgggggtgcttggcgaaagtcaatgtaccaataacgaagaagcgcaaacttggacctaagactgtggactgtgtttttctgggatatgctcatcatagcattgcctatagatttttaatagttaaatccgaggtaccggacatgcatgttggtacaattatggagtctcgtgattctatcttctttgagagctttttcccaatgaaggatacacatagtggttcgaaccaaccctctgaaataattcccagtccaatcacaccaccagaacaaactgaacatacacatgaacttgtctctgaggaggatgtcagtgaagctcctcgaaggagtaagagacaaaggacggctaagtcttttgatgatgatttcactgtgtaccttgtggatgacactcctaagtcaatttcagaagcatatgcatctcctgatgcagactactggaaggaggctgtccgtagtgaaatggattccattatcgctaacggaacttgggaggtgacagagcgaccctatgggtgtaaacctgtggggtgcaagtgggtgttcaagaagaagcttaggcctgacggtactattgaaaagtacaaggctcggcttgttgctaagggctatactcagaaagaaggcgaatatttctttgacacttactcacctgttgctagattgaccacaattcgtgtgctactttccctagcagcctcacatggtcttctcgttcatcaaatggacgttaagacagcttttcttaatggagagctggatgaggagatctatatggatcaacctgatgggtttgtagttgaaggtcaagaaggcaaagtgtgcaaattgttgaagtctttgtatggtctgaaacaagctcctaagcaatggcatgagaaatttgacaaaacattgacatctgcaggctttgcagtcaatgaggcagataaatgtgtgtactatcgccatggtgggggtgagggagttattttgtgcttgtatgttgacgacatactgatatttgggacaaaccttgaggtgataaatgaggttaaatcattcttgtctcaaaattttgatatgaaggatttgggagtagctgatgttatcttaaacattaagctaattagaggtgagaatgggattacactcttgcagtcccattatgtggagaagatcttgaatcgttttggctacattgatagtaagccttctccaacaccttatgatcctagcttgttgcttcgcaagaacaagagaattgctaggaatcaactggaatactcccaaatcattggctcgttgatgtacctggctagtgcaactaggcctgatatctcctttgctgtgagcaagttgagccgatttacctctaatccgggagatgatcactggcgtgcgcttgagcgagtaatgcgctatctgaaaggtactgtggaattggggcttcactatactgggtatcctgcggtactggagggttatagtgattctaactagatctctgatgtggatgagatcaaagccactagtggatatgttttcacactggatggtggtgctgtttcatggaggtcttgcaaacagaccattttgacgaggtcaaccatggaagcagagctaacggcactggatactgctactgttgaggcagaatggctgcgtgatctattaatggatctgcctgttgttgaaaaaccggtgccggctatccttatgaactgtgacaatcaaacggtaattgtcaaagtgaatagttctaaggataatatgaaatcgtctagacatgtgaaaagacgattgaagtctgtcaggaaattaagaaactccggagttataacgttggattacatccaaacagcgagaaacctggcagatcccttcacgaagggactatcacgaaatgtgatagacaatgcatcgaaggagatgggtttgagacccatgtgagttatactatggtggtaacccagtctatgtgatcgaagatcccgtgaattagatcctgggaagaacaaaccattaataaactagaggagagtaccaatatatataccctctccaagtgaagatgcatatactctcgtgagctgcaaggcaggttggctatgccttaatgagttctgttggctttaattagcaaagatgttgtcctgcagagcattcttgaaagaactcacctttgtgagcttgactgttggtcgcagtctatgaagatttggggtgaatcttctaggaagcttactaaagacctaggagtatgacttatacgctctacccgaggggtagtctacagacggtctagtaccagataagactttgagtgaaacttgcttgcacaagacttgcaattcaaggcgtagtccattgttcaagttgtgagtaagtgtagcttggagttctaggtggatgttcaaccttaattggtctccatcgaaccgctggtatataaacagtacattggaaaaggcaaatctcagtgggattttgagatttggtgggggattgttggaattaatgaatgggccttagcccactcgaagattaattctttggaaaatcacaaaagcccacctcatgggatggcatgcatgtggagtttagtaccaccttgcttattctaggagagggggacctccttaaaaggaaggatgccctcctagccacttgaagcatgtgtggtggagagaagaggggaaacacgcgcgcgctcgctcgcctcgcctggccgggccgggccggcggcgcgcgtgcacgacgtacgcgtcgaatggtccgaaaaattggctcctcacccttgcgcagatgcagcctccttttgcagttttgttttgctgcaaattcggattcgaaagatccggtgcgtgcaaacggcgtggagtccggataagttacgcgcgacttatccggttcggttacgcgcagtagagatcgtgcgggcgccctgatcaagcgacccttctctatataaaccgacctgccgtcttcacgcaacatacgcaaaatcaatctagggtttgcctcctactctgtactgcgccgtcgctcgtagactactccatcccgctcgccggtgtgcaccggcgatcgggagagcaggtctccggaacctctgccttcgacgttctgcaccgggagaaggcggcaataaggtttttgggaagcgcttcgcgcgactgctccctgttcgttcgcgacggctcgccttcctcttcgctcgcgtgtttcgtgccttcgtagacacttgcgaaaagtttcgaccaagcagccggtctttccgtcacctcggtacgtgttcaatatgttgcgcatatttgatttgttcatgttatactgtgtagtttatatgtgtagatctaatgatgcgttcatgctagttttcatctgtaatgtcatgattcatttatggaatagattaaatcattatatgtctataatctcaacactatactcggatggtgtccggagtccccgtgcattggatgatggtttgactgcgcgaatacacgccggcctatcaatgagccacagctgtccgtcgcatgtggcagcggaaggttcccaaggtgaggatgagtttgtgcatgaacggatgaaacatctgtgtacgagatgtggatggatgacgaactgacgagcctccttgtgtggctcgaagaattacaccggccaaaacgcagcccgatgccgctcgacgcggccggaggagagcacgtaatttgtgctctctgcagctgtgtgcaaatgcaagtgtgcaacgcgctcattttacaagattggccggtgttagttacaacatcgccaatagattgggggataaccatgtttgtgctgcatcgattgcaggcgacttcattgtgccaatctatgcatgtaactcgtaccgtcctacggctggtcttgcattgcatgtgagtgccacatagcctaattgaccaaaccttcttgtccgacatggagatcacgacgagatctagaggggtacgtgtcgagtacgcgcggggccacgagtgcacttacgttctcagcgctccacggagttgtggttctgagaatttttctcccacttctccagcgtattcttgtggtggtcgcggtcgctctgttcttgcgcctgcacgaagatttcggtgttgggacgacgagagacaagccacgctggaagcaaggacacaaaagtgagagtcgaactctgatttggaccctaggacatatagggtcagtactatctttccaggaacccccatatccaactctttttttttttttgaagcaaaccccatagccaactcttgagtcagagtacaccgtgattctcacatagtgcactacagttacatacagatcccatgctatgcatgaacctgaacgaaaaacaatttatcccatggagtcaacagttagatctggcgtcaggcgatcagcttccaggaaggaagcctttggcatcggatcgaagggcatgtaacttcaggtgaataacctgactaaaattctacctcatgttcgatatcctaaaacaaggtggaattttccccttcgcaatttacgacggccgcaaatgctacgacgcaagcacaggctgtccaccgtgcgctccgaggcgcctctcgcgcgtccaccgagaagacgcgtccgggctgtttgacggccggccgggcggccggagcaccggccacaacgctagtggagtagtggatcggatgagatggcaatgcgtgctgaccccacaacgcgtggacgtctcgtcccgtgcgcgcctcgcaacagcaacgctcgtgcggtctcggtcccccgcgcggcgtcacggctgccgcaaggccgggggagggcaaggaaaccgcgaatttgactcgcctgccccccagtcgcggcgttaccgcgccgaggtgcccgctatttcgagtgcacatgcacatgcctactagttttggatgccggtctcttatctcttaaagaaaaaacctggtaattcaaacttttgctgaagactcactgctacaaaatattaaatagatgtcggcactgtaggtgtccgaagtgctaaaatcaacacctatagatcttttcccacctctgcggtccgaaaacataaaaaatagcacctatactgtgggtgtcagtttttcagtaaaaaccgacacctttaattaattaaaggtgtcggtttttaggaaaaaaccgacacctttaattaattaaaggtgtcggtttttaggaaaaaaccgacaccttttaaaaaccaagccgagctgagcagataaagtcgagctctcgccgttcttatccacttccgctgcgtccccttctcatcgttctctttcttctcctcttctcctccccatggctctctcgcaccctcccctcgcctctctcgcgcgtcgacggtggcccagcgatggaggcagcggcggtggcgggagggaaggcggtggcggtggtggcgggagggaaggcggcgacggtcagatccagcccagcagatctggtgagaggggaggtagatccgaccgggagtggcggcccgacaggagaggaggcgggagcggcagcagcggcgggcggtgacgggagggaaggcggtaacggtgggcggtgacgggagggaaggcggcagcggcgcctcccctccaccagatccggccagaggggaggtagcggcggcggcgacgccctctcctccgccagatccagcgggaggggacgtggagggctcccacggctggcggtgtcgtgcgatagcggtagtggccaaggtaggcggcgactagcaggggtggattgattaacaatcggtactacaatgcacaatcggattatccaatcccccaaaccacaaatataccggatgtattaagaatcggtactaaatttctttagttaccaacaggtactaaagatatttttagtactggttggtgtttgttactaatcggtactaaagatatcttcaaagttagttcaaaagaaaacatctctatccaagtcagttgtgtgtagtaagtgcgatggtaacgcacgtgaggactgaggtgagagatcttaagttggaatcccacatcccacatattttttaccttagtatgcatctttagtaccggttccattaactggtactaaaaatcaagaattttagtctcggttttcttatctccgttactaaagagggtttagaactgatattaaagatgctttctctactagtgataaataatcttgtaaaaaattgacaagatagattaacatatcataaatcattgcacacatttgcaagttcaaattctatttctgtaagttgagataacaaatatactaactattattgtatgcatcctagttggacttttatttgttcatttttatatacaagtagtttaatctgtagaacttacatataatcttgtatgcatatgtcatgcattaacctatcttgttgttttttcaacaatattttttttttactatctgggtgcaaatgcgataagtgatacggcatcacctcaaggtacaaaaaatcatctctggttgctcggaatacaccaccttgattctacctgaagcctgaagggactagagtgcaattgttaatggaacagagcatgtgggatcttgggacaagtcgcatctggtgatctggggatggcatgaattggtacatgctgaaaaattgggtagcattcttctggatagtttgttcctcatagactgaaatccaaacgaagagggcagagagacgtatgttcacttgaacgaagcagaaaagttccatgcacattttgtgaatttattggttccggaaactcactttcatttctccgatcagcattattgccaactgcttacatgactgccacaaatgaaagaattacacacgatccgtatatacatcaacaaaaaaatcgccatctgttgcattttgctctacaccagcgtgttgcatgtaccagtggaggggttgtagagcgcgggaagcaggtatttcctcccgttcgcgccattggcgttatagcttgccccggtcgcctgatccaccttcagctcaccggcgaatccagggtacgcgccgctcccgaagactcccgggcacgccgtggcggcctccagcggcgcgtccctgctgccctggtagtacccgtcgccgaacgggttggtcaccgtgccggcgagcatgctggcgaggttcatcaccatgccgtccgccccgatgtcgccgttgggcgccacgagcggcgcgccctgcgggccgtacatgggctggtggaacggccacgcgcactcgccggggcactgcgtcgccgggttgccgacccagatgtaggcggtgccggacttggcgtcggagccgtgcaggccgcaccggctcatgccgaagccctccacggtcacgtcctgcgccgtgaaaacgagagcaatgccgcccttcttgggcttggcctgcgccgctagggcggcgacttgcgccagggtgagcgacttgcccatggagcagttgatgtcggacacttggctcgcgaccagaacctgggttttcttgctctggccgttggagttggtttgcaccgccttggataagtagagctcgtcgatgctgctccaccactgcgcaacggacggcgcggcggcgtagggcgccaccgagagcgacaggaggaagtcgaagagtatcgacttctgcgccggcgtgaacttgccgtaccagtagatggacaccgggatgttgccctggagcacggcgccgctgtggtaggagagcatgtcagccgggtctggcttgtacagctccatgcgccgccttgcacccatggatacctgagccgtgctcacaagcacaagcagtgcaagcataactgcctttgcagccattttggaactaactatgcttttcgattggacaacgaagtgtaaccagctaaggaagttgacgatggaaaggagctcaaggaagaagtgttggatttgcttgtgttctgatgctgagtggtgagcaaagtgaagtcatgagccgcttatttatagggttagagaagccatcactggagttggactgctaacacgttcctggatgcttccctaagcatggtgttcagatctcaagggacagctagccactgcacggtaacaaagtcacggaatcttgaaaattcaggctttgctgagctgttggagtgacactagaagattaacaaagttcaggtcagcggataatggcagccagagacggcgcaagagctgcggttagcagacaaaaccgctgcacgagcgttcggggggaaggttctgtcctcttgtggtcagggcaggacgtgaccgacggatcgcgttgctgcctgacgggcacagcctgtgtcgttcgtgcggcggcagcttgagaataatcttgtcaaaatctagctcaacgagcggcgccccggcgtgcgttgccgcgcccgtgtgttcagctgcatcacgaccgggccgggtaactactgcaacagctgggaagcatcttcagagacgaatcggagtgagtacgtaccatccttcctgtgatgcagccttcaccatatgctgctgctgccgctgctatgtgcggcatttgtgaattgtgaatggtgttggatccactgaatttttgggaagtcaatgcctatattttatcttaataatttatctatgcttgagctcatccgcgaacgaccggcgaaaccactgctcgatcagtgctcacggaggagagtttcgatttggaaggctagcatgggtcatgactcattaggggaagttcctcacgggatttggttggtgttcatccatatgcgcccattttgcacacgttgtacatgacggatcgggttggatgggtcgatgttggcagtcaagtacgtggtgtagaaagaaacacatagcgaagattattataactacttgcaaacttgaaatctttgcaagtaaagtggctgtttcattttcattttctttgggtaagaaatgagtacagtgtactcaaaatgtaaatactccggagttcagactaggttttgcaataggcggttggctctttgcctctttccatggattgctgtgttcaacagttcgtttgttacgactgtttgatggatagcaaagttttcaatattcttggcaagtcacacaattctttgaacttatgaagaaatagagaagagtcgaggaaagacactgaaggggacgcaggtattaggtggtgcgccatcagtcaaagaagatgaagaaataggagttttcaaatccagacgcaatcgttcactccgctcccattacaactgaggaggaatgttagaagtacaaatatattagttagagataatagtcaattagaaatatagagatgagatatatcctagagatataatcctactgataaaatagagtcttatattatacttcaagtctaaatctaatcttaaagataaatctaatcttacttgtattatacttcaagtctctatcctctacatactcctatatatataccccatgagagggtcgatataataaatttaaaaacatcaaaataaaacaattagatttttccacagttaccagtttcatctcctggctatacaatggtgtgacatcgtcaactaccagattgttggtactcgtgtttgaaaccaataaagatgaagattaattaagaaccaaaaacaaggaaactatatgcagactatatgcgcctgatcagttgagttttaattattacaaattcaaaaaataaatttatttgatattttagagcaacttatatatagatttttttacacgaaacacattgtttagccgtttggaaaacattactaacagaaaccgaggtaacatctacatcttaatacttcgtacatataaatattccaagcacacacgttaacttagaaaatgaataactggatggtttttgtttaacggaagatatgtacaatgtactccttccatcataattatttacattgagaataaaataggtcaaacttttcaaaacgaattttatactccttttggtcataaatagtttagaataaggctgatcaaacttttagaatttaaccattaactcatatcaaaccataaaatctatcaagcgcacgatcttatcatagcccttccaagataaatctatacatatcattttttttcctttttacattaaacatttgagaaactttgatggtcaaagcttcaaaatttgttctaaatgttaaatattttttttactggagtgcgtcttaggattgtttcaaactagagtctaataaatctacgttattctagtagtacgccttttgaaaaatttatacataacatgtttttacaaactaacggtttgagggaagtgattgttaatgttgtaaaagtttgataaaaaaaatacctgtcgacgagtggtactcgcggaccagaagaatagggaattggggtacgttggaatagggatctacgtagtacgacatcaaaacagacaaaagacgaggattatactggttcaggccccttatcaggtaatagccctagttcagtttatatgggattgatgatgatgaaaacagattacaaagagagtaaccgaattggcgataccgatgagatcgtagtcgagagattcgacaagatcccccggcgagttggctccatgaactccggcttcgtaaactttggtgggtgtattggcgatgagatgcaatgcccttagcctcccctagggggtcccttttataccgtggaataccttgaccccccaagtaagacttgaagattatgtaaaccaacacgatatattagagatcatatcccttccgagtaggtcttcggcaaatccttaacctcgtggagatatctttcatgatttgaggcaaattcctaataacgtatacggaaaccaaccgtacacgtaaggtataccttattagtatttcccataagtcataggatagagggtatgctttatccgtaaccctaacaataccaaaccttgacaaatatttatgccagagctaagtactttgctacactaaccataggtctagcactatataatctgccatttcaatgtcttttatttttcagtgttaacttacactttccattggcgatatcttcatttcgttgaaggtctgtctgcctgcatggattggcatcagggttagtgtttttttaaaaaggtaaaatttcgaggtatctacacggcatgaaagtagattcctggtttccaggaattcaaaatttaaaaacaaattcgaccagaatttgataaaaaattaacgaaaactatcatactgccagagtcaaaatctggtgctcaaattataaaggtggatccggtttggtatatgaatggattccatgacatatacgcactcggattcaaatcctctaccctcaaaagcatcgtgcttttatcactgatagatggatttatggttcataacataaacgagacattacaacatagagtttttctaccaagtttctgctattctcaacagcggggatcaacaactttaggaccatagattttaagctaacttgtataaggtgtggttaacaaatttaaagccacacttagctagcaagagacaaccttaccacactttttttttgcaattgacatgtagggtcttttttttttttttttgctattgacatgtagggttaatttgacgaagaaaaaaaaaatatgttacaagtgtggctatgaacaaaatacatagttaacatggtcaacttttctcacttcagatgtgccaaattgtggcatattatagttatcatcgatccatacgcatgcatgccctttgcaaactgtactgatagcacaaaagaacacaagtgactgagtgacatctgacagaagtatagaagggactgcttaaccaacatgcgactgaaaatcctcccaaaaaattttcaaatgtatttatagtacaatattataactagcatataattataaatgtaacttaggtgtaaattatatgtaaatataaaaaaacaagttagctcagtggaagggatgagttaaaatcacggatttgagtcctggtacgtgtaacagtttttgtctcttatgccatgcacgaatctcagcatagcgtgaatctcaaatacaaccaatggtaaaaaaaaagtgcaagattaagccatacaaaatctgttagtagatggatagctatttcgattttatttaccgatcttcttaaaaaatcatatctaggggtattattttttttcaaagaagtacaagtagtatttactcttgaccactctttgctccgtatatacaccggtttatcattacaccatatttcctccgtcctgagtccctcacaccaaagttgaacaggttgacgtggcaggatcgaacaaagccggaagcaggtatttcctcccgtgtgctccattggcgttgtagctcgctcccgtcgcggggtccaccgccaggttcccggcataaccggggtacgcaccgctgccgtagacccccggacacgccgtcgcggcctccagcggcgcctccttggggccctggtagaacccgtcgccgaacgggttggtcacgacgccggcgaccatgctggcgatgttcatcaccatgccgtccatcccgacgtcgccgctgggcggcaccagcgccggcgtctgaggcccgtacaccggctggtggaacggccacgcgcactggccggggcactgcgtggcggagttgccgacccagacgtaggccgtgcgggccttggcgttcgacgcgtgcgtgccgcaccggctcatgcagaacccctccacggacacgtcctgcgcggtgagaaccagcgcgatcccgcccttcttgggcttggccctcgccgccagcgccggcagctgggacagcttgaggctcttcccgagcgagcactggtcgtcggtgagttggccggcgagcctcacctgcgtggtgatcttgccgcctccgccgccgttcttgccctgcgccgccgccttggacaggtacagctggttgatggtgttccaccactgcgacacggacggggtcggcgccggcgaggcgacggtgagcaagaggaggaagtcggagacgacggccttctgcgccggcgtgaagcggccgtaccagacgaccgacacggggatgtcgccccgcaacacggtgccgttgtggtacgtgagttgctcgctgggcggtggcttgtacagctccatgagcctcctggctcccgcggagggatgtgccgagcacagcagcagtactgaaaccagcacgattgccgcgtggctcatgtggtggacggtgcaaaccctacgatccgaggccatgatctcgtagtgcaattgttgtgcacgcttgcttggtgcgagagctgtgtatacaagtacgtgtgtctttgtgtggtttctgaatagctacgggagtggatatttataggtgtgattcctgcatgccaatatgccacggttgcagtttcgtgcacacttccttccagtttggcccttgggctgtgaggcggctgtgcctctgttttctatccccctttttggagacgctgtgcctttatttcagtttctggtggtactcctatttcagtggccatgggttgactcggtgggaggcagctggattttgtttggagcgagggacgcggattggtttgtcgcttccactcgcaacagccatccacggcggcacggccaccagccaccacctctccacgcaccatgcggcagcatggacgagacattgttaaatatgtggtccgaattttaggcccacaatatattcggattagttttctagtaggacttcatgtctatcctattaggtgtctttctattatcccttatatatactcttgtaaaccgtacaggaaggggtgacgttcccattgttattcccctatgtttgtaatcatctactctatagtgatcattgccggtcggcgcccgtggttttttcccgtaagggttttccacgtaaaattcgtgtctccgttgtgtatctattttcataacaagtgatatcagagtattggagatcgatctactgcagtcccggccaccggcgatttttcccaatcgaagaaatcgatctaatcggtggcacgcgtagtcgtgttcgtcgtcccgtcgaaattctgttcggcgaaatccaatccaaagcggagtcgacttcgtccttcctgccgcgcgagaatcagagcagcagcagcgcacgcgtcaggagaggaaaagcaagcagagagaaaacccttccatctgcagtgcacgttcaccgaggaaaagtagggcagaagccagaagccatcgagataggagcagagcgctccatgtgaatttttattcacattgaaattgctacgcgcacacaagcttgtctaccaggaagtttcagatctacactacgtgcacacgagaagtgtaccaggtttcgcgtttttgctagtttaccctaatttcttactagcaaatttcaggattaattcccatggcgagtttgaagtatgatctaccgctcctggaccgagacacaagattctcaatttggcaagtgaagatgcgagccgttcttgcacaacaagacctcgatgatgcgctttctggatttgacaagaggacacaggattggtccaacgatgagaagaaaagggatcgtaaggctatgtcatatattcatcttcatctatctaacaatattttgcaggaggtgcttaaggaggagacagccgctgggctgtggttgaagctggaacagatatgcatgactaaggatctgaccagtaagatgcacctgaagcaaaaattatttttgcacaagttgcaagatgatgggtctgtgatagaccatctctccgctttcaaggaaattgttgctgaccttgagtctatggaggtaaagtatgatgaagaggatttaggccttattctattgtgttcattgcctagctcatatgcaaactttagggatactatactttatagccgtgatactctaactttgaaagaagtttatgatgctttgcatgccaaagaaaagatgaagaaaatggtaccctctgaaggttcaaattcacaagcagaaggcttggttgttcgggatagccaacaggagaagaacacaaacaacaaatcaagagataaaagctcaagtagctaccgtgggagatcaaaatccagaggtaggtataagtcatgcaaatactgcaagagagatggacatgatatctctgagtgttggaagctacaggataaagacaagagaaccggaaaatatataccaaaaggtaagaaagaagaggaaggtaaagccgcagttgttactgatgagaagtctgatgcagaattgcttgttacttatgctggttgtgcacaaactagtgaccagtggattcttgatactgcatgcacctatcacatgtgcccgaatagggattggtttgccacttatgaagttgttcaaggtggtactgttttgatgggtgatgatacaccatacgaggttgcaggtattggaacagttcagatcaagatgtttgatggctgcataagaacattgtcagatgtgcgacatattccaaatttgaagagaagtctcatctctttatgtactcttgatcgcaaagggtacaaatattccggtggagacggaattttgaaggtaactaaaggctctcttgttgtgatgaaagctgatattaaatctgccaacctgtaccatctgcgaggtacaactatattaggtaatgttgcagcagtttttgattcattatctaattccgatgctactaatctttggcatatgcgtcttgggcatatgagtgaaattggtttggcagaattgagcaagcgaggattgctagatggacaaagcatcgggaagcgcaaattttgtgagcattgcatctttggcaagcataagagggtgaagttcaacacatctacacattggtttggcagaattgagcaagcgaggattgctagatggacaaagcatcgggaagctcaaattttgtgagcattgcatctttggcaagcataagagggtgaagttcaacacatctacacatactactgaaggtattcttgattatgtgcattctgatttatgggggcctgctcgtaagacatcttttggaggtgctcgttacatgatgactatcgttgatgattattcgcgaaaaatttggccttatttcttgaagcacaaatatcaagcttttaatgtgtttaaagagtggaaaactatggttgaaagacaaactgaaaggaaggtgaaaatccttcgtactgacaatgggatggagttctgttctaagatatttaaatcatattgcaagtctgaaggcattgtgcgtcactacaccgttcctcacacacctcaacaaaacgtcgtagctgagcgtatgaacaggacaattatatcaaaggcccgttgtatgttgtctaatgcaggtttgcctaaacagttttgggcggaagccgtttccactgcttgttatcttatcaatcgatcacccagttatgccattgataagaagattccaattgaggtatggtctggttccccagcaaattattcagacttaaaagtatttggttgtactgcttatgctcatgttgataatggtaaattggagcctagagctattaagtgcatttttcttggttatccgtctggtgtgaaaggctataagttatggtgtcctgaaacaaaaaggttgtgattagtagaaatgttgtcttccatgaatcagttatgttacatgacaaaccttctactaatgttcctgttgagaatcaggagaaagcaagtgtgcaggtggagcacttgatcagttcagggcatgcaccagaaaaagaagatgttgctattaaccaagatgcacctgttattgaagattcagattcttctattgttcagcagcctccaaaacattctattgcaaaagataagcccaaaagaaatattaaacctcctcgaagatatattgaagaagtgaacatagttgcttatgctttgagtgtggcagaagaaattgaaggtaatgccgaaccttctacatattctgaggctattgtttctgatgattgcaatagatggataactgctatgcatgatgaaatggaatcacttgaaaagaatcatacttgggaattggtgaagttgccaaaggagaagaaacctatccgttgcaagtggatcttcaaaagaaaggaaggtatgtctccaagtgatgaggcaagatccaaagcaaggctagttgctaaaggttatagccagattccaggtattgatttcaatgatgtcttttcccctgttgtgaagcatagttcaattcacactttacttagtattgttgcaatgcatgattatgaactagagcaaatggatgttaagactgcatttttacatggggagttagaagaggacatttatatggagcaacctgaaggttttgttgttcctggaaaagagaacctagtctgtaggttgaagaaatctctttatgggttgaagcagtcacctagacagtggtataagagatttgactctttcatgctttctcagaagtttagaagatccaattatgatagctgtgtttatctcaaagttgttgatggttcagctatatatttgcttctttatgtcgatgatacgttgattgctgcaaaagataaatcagagatagcaaagttgaaggcacaattgagtagtgaatttgagatgaaggatttgggtgcagcgaagaaaattctcggtatgaaaattactagagaaagacattctggtaagttatatcttagtcagaaaggttatattgaaaaagttcttcatcgtttcaatatgcatgatgcaaaaccagtgagtactcctttagctgcacatttcagattatcttcagatttatgtccacagtcagattatgatattgagtacatgtctagagttacttattcaagtgcagttggttcacttatgtatgccatggtatgttctcgtcctgacttatcacatgcattaagtattgtcagtagatacatggctaatcctggcaaagagcattggaaagctgttcaatggattttcagatacctacatggtacatctagtgcttgtttgcagtttgggagatctagagatggacttgttggttatgtggattcagattttgctggagatttggataagagaagatcgctcacaggttatgttttcactattggaggatgtgctgttagttggaaggcaagtttgcaagcaactgttgccttatctactactgaagcagagtatatggctatttctgaagcttgtaaagaagctatttggcttagaggtttgtacactgagctttgtggagttacgtcttgcattaatatattttgtgatagtcaaagtgcaatatgccttacaaaggatcaaatgttctatgagagaacaaagcacattgatgtgagatatcactttattcgaggtgtgattactgaaggtgatgtcaaggtatgcaagataagtactcatgataacccagctgatatgatgacaaagccagttcctgctactaagtttgagctttgctcaagcttggtgggtgtgacagtatagtcctagagactatttggcgcgcggtgattttacctacatgaggtatttcttggtgattgatgtttttatgctacaagaggaaattcgtctcaaggtggagattgttaaatatgtgatccgaattttgggcccacaatatattcggattagtttcctagtaggacttcatgtctatcatattaggtgtctttctattatcccctatatatactcttgtaagccgtacgggaaggggtgacgttcctattgttattctcctacgtttataatcatctactctatagtaatcattgctggtcggcgcccgtgatttttttccgcaagggtttttcacgtaaaattcgtgtctccgttgtacatctatttttataataggcatcgcacgccacgcgtcggcacctcgcaggacttctgcacgtagtgcaatcaggttaactgactggtgtaggtgttcactgatttttctctgaaccggcgaaagaacgcgtgttctaaagtgatcttaatcatgatgacttgctgacgtatcgtgacttgtttgctggaaatgaacggcaaatgacttgagttcccaggattcatgcatgctttctggagggaagaaacgttatttactcggaacaatcatcacctgattttaacatcacctggcagcaacaaaaaacgagagaaaaataacttgaagcaggccgaatacgtcccctgtttccagagtggaccagcatgtatgggatgtgtatatgtatgcactatgcacgccgttaaatttggcacattatcatcagtgatacaaagacagtagcataaacaacaactactacgtttcttaccactagtcaggtccaaattacagttggcaagatcaggtcagtggtcatcctgtgtgcaatgtgccagcaactgcttgtgttgagcaattgagacctggagaattctaccggattcacatccttgtgcttcatcacgcaaatgacaacttattcctaagaactattgacactctgaccatttgctagccatatgttcggcatcaagttagtttattccaagcagcagcggtaacacatgatccaaagcccgtggaatgcggcatctccgtgcttatccggtcccttgtcaagagaacaacctatacaagaatacaacactagctagttaataccgctagtgttgatgctgctcacttgctcagtgctcacaatcagcggcaaataaaaccgaatactccctccattgcaaattgatctacgtatttcataggtacaacaagaccaaaaaaaactaataactctctcatactatatttactctagcaacaaactctatgcatgcaccatccctactattttctagccaatagcaaatcaagatattgcatatggtttataaatacttgtgtgcatggatgcatgcatcaatgttcatttacttcaatgtacaaataacgaatagacatactgaatgaatttataaatacttgtatgcatggatgcatgcatcaatattcatttactccaatgcacaaataatgaatagacttaatgaatgaacacaaatatgtagatcatttaggaataatctaaaaaaatatatgtagatcaatttggaatggaggcagtattaatcagcattttgcatactccatcagtcaatctaacaaccgtacgtgtggagattcaagtgccccatccaagataagatcaccaggagaattaacgagggggtagaggacgggagacacgcgcgagacacagagcagccggtttgatgacgagcccgacgtcctacgagatgacagctcgagcatccaatcccagtcctaggacactgtcgcagagttaaacagatgtgccgtatgcgtacccactcctctctaaaaaaacacaagtctctataataaagatttatatttttatgagagagcctaaagtttagtccctagttcctaaacatgccctactcgtatcatactactactccaatacgcgtattattaattcgatcgtgttgatgacttgtttacgtcttctactagtatactacacgatatccagataatactaccaagaagcgagtagtccaactgacattatattagtagctggtatggcctgactgcacaagtggtagtagtaaaaccttcccggttgctgaacatttctcactgggtccagcgtctccagctcagacacgattcaagctggagccgtagcaaatgagtaatataagaacagttgctagactgtttccgaactgcaaaatgattattcgtaatcattgtgtttggtaagcaaacaaaatccaagtgtcaagataaggtcgaatcatcatctaaaaaagggtaaaagtcgaattaagaaatcggtagtactcagcagagtgggagtagtgttaactaacctctgctgccattgtgctgtacggagtaatggttacagcatcgttgtcgatgtgattactgtattggcgtcaatgtaacagtcttgatactgttaacgtaaactctgccacagaagggatacgaggcgtaatagtagcacgtagtacttgatttgcacgagcctaccagtcccggaggacatgaaagcttgaagccggataacgtgagaaaaccaggacggcctgcaggcaaccggggctcgcgacctcgcgtgagcagatcgcggatggaagcaggtttcccttgccaccgttttcaggcttaccgcagggtatggtaatataaataccgcggtaacttccttaaattcaaataaattttaaaaataatttaaatttttaataaattttacacggttttccgtggttactgttaccgtgcttactgtcggggcacggtaaccccggacctggtggtttgggaaaccatggatagaacaccatcatcaacatgctttcgcaactgtaaaagggcgtcagaaaagatgggttaaattctggtttcacttttcagagcacgcaccaacaaacgccagctgccttgccatttcgtctcggctccggcggagctgagctagctggcctgcacggaagtggaccaacaaaagcgccgctcccgtggtccatcgtgacgcgcctagatatgataccagcgaaagggcaacgcgggcaggcacgaatgaatgcgcgatccgtccgttcgcaattcaccgccgctgctgctgctgcctgatctgcctgcacgtccgactgccacaccggggctaggctggctggcggccggctgtccggctagcggctagtgagactgggagtagtagcagcgggatacgacctcacgagtgcggcgtgatgtgcgttgatggtagtagggccagcggatcgtgctgccgcgcatcccgatgacgcgcatagagcgagtagtagcccgcttcaccaccagctggcgtggggtatggatctctaggtgagccggataacgttggatggcgtacgatcgttatggcgaacgcaacgtgcggaagtgtggaggatggcgcgggtcagccgtgggggcctgtacttcagctgggctttggctggtactagtacgccgatgggccggccagcgttttctcacgagaatacgacgaccatacgagcgctttctcatccgcagcttctcgtggccgcctcctcctcctcacgacctcacctgcctgcctgcggccagccggccaccgttttgtctctcttccccacctcccattgaattttttttgtcccttgatttcatcaacactcacgtgaccaaatgaaacatccctccatctctccctgcatttttcactgttatcgccgtgttcgtcctcacattgcttgctttgcatagccagcaccagcctggcttctgtataagttctaacacgcttttataaaaacgataaacctaatgctggtgacaccggccagtggtgacaggtgagttgtgcgccaacagtacaaccaacctactcgtacgagtaactactgctgtgcggtacatcaaagctgtagtgatacaccccaagtccccaacgttcaaaactgggatggcgctggcccacgctacatgccatcccaacgttcgtgttcccctgctctccgcactccactctgcaagctgcttcaagcctcctcgagaagccaacctgcttttacccactcccgcagtgcccactttacccattccgcccgcaatccctaaactgcccatgcctttacgcaggattcaccatgccatcgagccactgatctacagtatccgaggcgccagcttgaggggtagaatggtcagatgcccgctcagcaacagctgggagcaggcaggccacgcaaagccagctggccagtgaccgttcgggcagcacggccaaggacgcgtcctttattttggctcagaaagctgcggctctctcgatcatacgtcacgcggaaaattaaccatcccccatccacttctcacactccacttcactctcctcggccaactataaagcccgcacccagctcgatctgcttccccacccaacgtccccaagaactcatctggccaaaaacccaccaaaatcctctcgatccatcgccaatggcggcttcctccgcagcttttgcagcgtgcctgctcgcgtgcgcgcttctcttccagatgtgcgtcgcgtcgaggaagctcaccgcgctggtgcaggaccagcccatcacaatgacgtaccacaagggcgcgctcctctccggccgcatcgccgtcaacctcatctggtacggcaacttctccgcgccgcagcgcgcggtgatcaccgacttcgtctcgtcgctgtccaccccgccgtcgccgcagccgcagccggagccgtccgtcgccagctggttcaagacggcgcagaagtactacgccaactcgaaggcgcgcttcccggcgctgtccctcggccagcacgtgctcgaccagtcgtactccctcggcaagcggctcggggagaaggacctcgtcaggctcgccgcccgaggctcgccgagccgcgccatcaacgtggtgctcacggccgacgacgtcgctgtcgacggcttctgcatgagccggtgcggcacccacggcgcgtcgccgcggtcccgcgccgggcggttcgcctacgtgtgggtgggcaacccggcgacccagtgccccggccagtgcgcgtggccgtaccaccagccggtgtacggcccgcaggcggcgcccctcacgccgcccaacggcgacgtcggcgtcgacggcatggtgatatccctcgcctcgatgatcgtcggcaccgtcaccaacccgttcggcaacggcttcttccagggcgacgccgacgcgccgctggaggccgccaccgcgtgcgccggagtgtacggcaagggggcgtacccgggttacgctgggtcgctgctggtggacccggccagcggggccagctacaacgcgaatggggcgcacgggaggaaatacctggtcccggcgctcgtagaccccgacacgtcggcctgctccaccgtcgggtagatttgttggaatggagtagaggactgttgttttgttaccacggtggagagtgttccacgcggctaaaatttgtacctgggggtagtggtgaaattctttcatttgttcaatgaaaaaaaatattagttaaagatagtactgttcgaaactgaatcaacatcctcacctcgagatcgatcatcgtgcatccaaaaatcctgcaagttgtccgatgtgcataatgttaccgttgtggagattgaatgatgtagagaaatcacactttgcacggaatagattaaaggaagataatgaaagtggcgctgacaagatggaagcgtttctaccttcgcaaggattcttggccgatggatcaaccatgaaagtagttgtatggtgaaggcttttcatttcgcatggaatttgaagagattttagtcgtctgtattatcagatcgttgtacagcaagcggttaatcctttcagcctatggagatggatgtaatgtggttgtatgaattatctttgttttgtttgttttatgttggatataacagaaatctgtaaaatacaaacggaaaccgaccttagctcagttggtagagcggaggactgtagtatgtgcagataaatccttaggtcgctggttcgaatccggcaggtcggatttttttaataatacatttcaaacaaatcgtccacattattacgaagtttcctcattgtctattcttctctaaaaaaactgatttcgtttttgctatggtttttttttaacaagtcgtccacatcattaccaagtttcctcattgtctattctctatttagattgcagttatgttttttttaacaagtcgtccgcatcattaccaagtttcctcattgtctattctctaaaaactgatttcagttttgcttgttcttttcttttttgaacaagttttgttctgttttgatgggtcgtgacccgtgaatcgtttgacttgtttggtttaaaatcataccaaaatagcttgggtaagtgctaaatcttgggtaagttttggtactaacaaatgttttatagtatagatttggtaaaaaatagcttcaatccaaattgctagtaacatgtagttttattcaaaactaccaattctgtagggtaagaattgtaccaaaccaaaatggagttttttttttttcattttttttattaaaagttttacaaaaataattttccattttgaaaattgacggaattagtcgcctaccactctctgggagggcgatttttaaaaatcgccatcccagagggcggcgaaagtgacgtggcagacggccgttcgctctcgggcgacggccgtcaacgaaatttgcaggcggcccccttgccgccctccgctagggcgattttgtactgtgcagggggccgcctgcaaatgggcggcgaggagggcatggaattttgcaggcggcccccttgccgccctgggggagggcgatttttgcctccccctataaagcccagtcccccctctatgaaatttcattatattcactaaaaatccaaaaaaaaacgaaagagagagaggggagggcagcagaaggggagcggcgaagccctgctggttcgctcacttcatcacaggtttgctcccatacatcttttgcatttgtactaatatgttatgtttgagtatatatgttgcgttttagttttagttccatatattttagcagatctgtagcacacagcatatatgtgtagatccagagtatagaatataatagtatgaattgagacatagacagtagtgttaattgtaagatgtagtttagtttgatctggagaatgtaacctacttttagaattttggagaacaatattgtagagaatgtaacttagggcgtagtacagaaatgcgaggttaacgtagttattgttttcatcaggcacaatgtcaaataaggtcacatttcagatagttcacgatgaaggaaatattagatttggttcagatggtattgatctgtcagattttgtaatgacatctaagggcatcgataggcctgcggagagaacatttcagtcaatttatagttggttgttgagaggatttagaatagaccaagaagtctacacaatgtcagtatcagttgtagtgagtcgtgaaacagaaggttatttttgggaactaatgccgatggacagcactgctgctttgagacggtatgtggaaatggcttttgaacggtcatggcccctcgttatatttgtgtcggtacaagagaaagatataaatgtttcaatgcaaaccgaagatgtagagggtcctagcaatgcaggggatgttgttggaccatcgatgcaaaatgaggaaaatcaaccaagtgaggagcaggccatgggcatggcggatgagggggagagagtcggtataattgttgatgaaatggagagggaagattcggataatgagcaagcggacgacgacacatcatccgatgagaaaggtgatgtaatggccactgattgggcaaatgaggacttctctggacttgttatatcagagggtgatcatgtaccctgggagtataaggagaacgaggtaattgagggtgcaaggtatgcttataaggatgagatgaaggaggcggtgaagcattgggcagtttccttgcagagagagtttagggtggtcaagtcaacaaattatgtgtatgaagtgaggtgcatgaaggaagattgtccgtggcgtgtccatgcatataagggtaaatggaatgattattggaaagttagcattgtgaccgagcacaagtgctacttacaaggggtggagaagtatcaccgaaacatcacttcagcttttgttgcaagtgagatgtacagcagtgttgttggtaacattggctttgaaccaaaatcaattattaggcacatcgagaacaaattcaagtacaccataagctatgcaaaggcctggagagccaaacaaaagatgattgagatgaggtatggcacatttgaagcttcttatgataatttgcctcgtttgttagccaccattgcccagaggaataataatacttactatgacgtacatacatttacatcggttgatgatcgaacaaagagtgtgctgcaacgagcctttttctcattgggtgcttgcatcaatgcttttgtgcattgtcgacctgttctatgcatagatggaacttttttgacaggtaaataccgaggtcagatattgacagcaattgggtgtgatgggaacaaccaggttctacctatggcttttgcatttgtagagagtgagaacactgaaagttggtactggttcctagagagagtgcacattgcagtggtgcgtatgaggcccaacgtttgccttatacatgatcgtcatgcgggcatgttgcgggctattgactacttgaagaacggttgggatgagaagggagttccagctaagtggcctgatgttcggagtcggtggtgcatgcgtcacatgggtgcaaatttctacaagcaattcaagaacaagcatcttatggagctctttaagaggctctgtgcacagaaccaagagaagaaatttaatgagttatgggacaagttggatgagttgacaacgaagcaaacagacgagcaatctcgcagaccacaagttgaaggtgacgagcctcccatacctcttggtgcattacatgatgacccaccaacaatgagaaggaggtcggggtcgtccatcagaaatttcactcagtggattaagaatgagcctaaggagaagtggtctctattgttcgacaccgatggatctcggtatggcataatgacaaccaatttggcagaggtgtacaactgggtaatgtgaggagttcgggtacttccattggttgctattgttgaattcatccttcacggcacgcaagcctactttagggatcgatacaagaaaattggtccatccatggcagataacaacatagtgtttagcaacgtagtgacaaagtacatggaagataaaatcaaaaaggcacggagacatagagttgttgctcaaggcacacaagtgcatcggtatgaaataatgtgtgttgataggagcaggcgaggtatctatcgcaagcaagccgtgtagaaatgtgtcttgaaggcgaatggtggatgtacctgcagttgtatgaagccgaagcttcatcaccttccttgctcacacgttcttgcttctgccggtgattgtggcatatctcctaatgtgtacgtctcaaattatttcaggaaagaaacaatctttcatacatggagttaggagatatatgggttcgggatctcaggatcttacacaacgctgagtgcccaagttttttatattccagatccatctaagttaagggtgaaaaagggtcgacgccaaattagacgcatcagaaatgatattgatgagtcagaagcaggtgggaggactttacgctgcagtaagtgtgatctgcgcggccatacttacaagaaatgtccgaagaatgcagaagttccaagcggcgcagatgctagtccatctggataggcaagtgatggtaggcgaccacctggtgaaggaacaacaagcaggcgcgcaaggccaaggcgtcgtcgcgcagcaggcgattccatggtgtaacaatgctatcgatttaggaaataaaatgctattgtgatgtgatgattgttcggactaaatacttctatcgtgtaatttcaattgaatgttgttgtaatgagtacctccgactattgttgtactagtagtattgcgaactattcggtgttgtatcataatgttatcgtgatgagtgttcggactaagtactcatatcgtgtaactgcagttattgttgtaatcagaaatattccgtattgtgacacttttgtttgtttgtactcttgtttaatatgtgttagtaattcgcttatgaacatttattacttatgttgaactaattatttctatgtttctgatcaatctatttgatgcaggtatggcgtacgacacaccggcgctgttgaaccgtgggattgacaggaaccaccgctcgttcctgtcagcagtcgagggtgcacagctcggcaccttccgtccacgcacgtcgcgcgagtggttgcgtgtcgacccccgtcacgttccttggtacgcgtatgttcacatttcaactcaactttgctttgtgttatacttatgtttaaagtttgctctatacaggttgcgtgcggcaggacttctaccactttgtaggcttgttgaggcggcggcagatgaccgtgacccagcgaagcggtgggatgcagaccggtcactccttgccgctctggtagaccgctggagacctgagacgcacacgttccaccttccctgtggggagatggctccgacactgcaggacgtgtcgtacctgctcgggctaccgctggccggagcaccagttggtcccgtggacggtgtttttgggtggaaggaggatatcactacgcgcttcgagcaggtgatgcgccttccacacctaggactggccaacacccttcctccgtactctaccattgggcctagcaaggcttggttgctccagttcactgtaagtaaataagctgttattatcatacatgcttatttgcggtcaacagagtgttttgtactaacatttcattcttaattgtaggcggaccttctgcaccctgacgctgatgattactcggtccgacgctcccttgaggcgtacctgttgtggttgttcgggtgggtgatgttcactagcacccacgggcacactgtggactgccggctggtccactacgcacgatccatcgcggatgctcagccacaggacgtgccgcagtggagctggggttctgccgtgctagcagccacgtaccgtgactatcttcgctggtaccttcctcgcactcatgcacgtgtgaccttcactccagacgccccagagccgcacgttgccgctgtcacggacgcgtatcccacgcaccgtgaccgagactacttcgtgggggtacgtcgaatttgtattagtttttacaattatttcatttatcttgcataatataggacaattactgaattttttatttccatcttgcataggccgatgccgcacgggatatcggtgccgatatcaccgcagtccaagtgaggttgaacagaggtttgcacttgactaacgttgagcagagggtgaccttcgaccggatgcaggagaagatgcgtgcggtcatgcgcgtcttctcctgtcgcagcgccgtggacgtcatacctccagctggtccagtacaaccacggcctcgcgcgtctaccgtcggagcaggacctcgacctacggcacctgtttcacacggtactgctcagcccagaggtttcttaagttttgtttctgtttttgtacgaaaacatcaccccgtgtaacttgatgttccatcctcgcaggacctcatttgccttcgagcgcccctagcttcggagcagtgcgacctacagcaccggtttcgcacggtacagttcagcctagaggttagttcatttttgtttcagcttttgcacgaatatgtcaccatgttttaactgcacatttcctcatcgcaggacctcgtctgcctttgagcgcgttcgcagccacgaccggcgcttccgcgagctccgcaagggcattcgccagcacttccggcacattcgccacctcttcgggcgcgttcgccagctcttcctctcacggagcgtcaatccctcgcccacacggtactttaatttttattaatactattaaatacctgtatgaaactgatggtccttgtccaacagaatttgcagccgggatcttcggtactggggcctcttcgtctcacgccggtaggactggtcctactagccagttctacgatgatgacttgcacggtgcacaccaccacgacgtactaggctcctctcagcttggaggagctccagaggcgcacactcagtagcagccagaggtcacacctgtacaggtaggacgggttggctgtgccatacccccggaccgactcacgtactcccaggggcacgttagggcgcagggtaggagggactggggtaagaggcctcgtcagtagtgttctacctcttcagtgcttatgtgaccgtatcttttggcttacaaacttgtaaaacagtactacttttgctattactactgcattactacttgtgtttgtctcgtctacatagttcttttcattcatatggtgctagaacaacttatgctcacgacaacacactttcggcgcttcacggtagtgtcatatccagtagcgcgcacagtccgcaacagcacacatgaaaagcggcggctcgagtagtcactatcaactttcggcgctgcctgctgacataaagtgaatcacgcccgcgcgtgctcgtcttgtcacatctaatgaataatgtatcttattgagttcacatatattgcactgaaaacgacgctatataattgataatctgaaggcaacctcttcatatcttctttcccactagcacacaactaacgaaaatggaagcgccattccttgagcgtctcaactggcgaagcgatccttttcctggttggtttccaccatggtgtgaccgtcctttgtgcgattgtggggatggatgcatactcaggtcttccctcatgatacaaactcggggcaggagattcttccaatgcacgaactttgatcaggtatgcttcatctattcgaagttcaaatggataaaaaacctaacttcttcatacacaattgtaacatcttacgcagacatatcgtccaatgtgcaacttcatcgactgggtagacatggagaacccacaaaacgacggaacacgtgcatacccacgtagtgaaacaagatcggactacctaaggcggaaggatgagcatgaacgtcgaattgctgctgaggctttagaatggcaggtaaatcccctagaactccccacgtggcgtgagcgtccggagtgtcgttgtggtgaccgttgtcaggtcataaggtccgtaaggcaccgaactcgaggacaaaggtgtttcatgtgtccaaacattgtcgacgatgatttcgtggtaattacaactattcttttcatcactcctcagtattatcattaacttaactatcccaaaatggatgtacataggaggatgtaaggaaatgtcaattcgtacaatggattgacacagtcagagttacttcaagtggtgggccgataacgcaacctgaaccgaccatacagttcattcatgcttggatggagtacgaacgtcgggtggaaattgcaagcttagactggaggaacaatccattagggttacctaaatggtccgagcgtccaaagtgtgggtgcagagatcgctgccaggtggctacatcctttgttgaacaaacatttggaaggagatattttgtctgccccaatgtagacaacgatttcgttgtatgtctaaccgtttacaaaatccgctatgatttgcacaaaattactacccaaactgaataacattactatttttacagggcaatccaaggatgtgtggatttactcgatggatcgacaatgtcactccatcatatcaaggccagaagataacagagttagaaacacaagtagagtatcaacgattgaaggaccacgagaatgcaatgcattctgaccgacctagaagaggccgataggttaccgcatgcttgattcgtcaggatcgacaaatttgtaccgtgtatcgatggcacttcttatctatcttatcattacaatgtttaattatggtggtgaatttttgtatgcataagactaagggcctatttggattgctactaaaaacatgccctaccaatattttggtaatttgaatagtacttgtgtttgatttcgattgaagcctattcattggtaatacctaatctagatttgagattatgtagaacattcttcactacaattttatattttggcagcaaaccaaatatgatcaaatgcaattttaccttaccaaagatttggtagtgccaaaacttgcttatattttggcactaacaaaatatttgtacggtgacattccaaataggccctaaaaaataataaaattgtattttaccagtcttggagattttaatcttgtatagttttcaatataaaaagatttgataactattgatatttataaaaaaatatatttctcaaataaagcacagtataaaatcgccctcccccagggcggcaaaggggccgcctgcaaaattccaggccccccgccgcccatttgcaggcggccccccgcacagtagaaaatcgccctattggagggcggcaagggggccgcctgcaaatttccatgccccctcgccgcccatttgcaggcggccccccgcacagtacaaaatcgccctagcggagggcggcaagggggccgcctgcaaatttcgttgacggccgtcgcccgagagcgaacagccgtctgccacgtcactttcgccgccctctgggatggcgatttttaaaaatcgccctcccagagggcggtaggcgactacttctgttaattttcaaaatagaaaattatttttgtaaaacttttaataaaaaaattaaaaataaaaaaaattcaccaaaatggcccttgatacgtgaaacggacgaacgctcgttactcatcgcagaacgctggcccgaggtccgtggcccgtggatgcttctttatagctccttgcttttccacattctcggagcagcccattgtacataggaataagttcactttggatccctctatttgtcgcccagtccgattttcaaccctcgactgcaaaaccggatatgacccgtcctccaacttacgaaaaccgggcaaacgaggtccctcagcggttttgatagcggttttggctgacgtgacgcctacgtggctaatttgactcggtcttcatctaacgtggcgctgacgtggcaattcgatccggaaaaataataaagcccatgggacccacatgtcattttcacacataaaataataaaaaaatagtggcacccacatggccccacatgtcatactcaccccctcatcttcttcctccctcaccatctcccctctctccatctctctcctctcctttctccagcctccaggcgccacggctcatggggtcacggggaggtccggcggtggcggccggcgacgcgacagtcaccgccgccggcgagctccacctatcggcgcagccgtgcagccacgcgtgtttctgaccccgcgcgcgcgtggctgtctgatggcatgggcggcacggatggattcatggatctatccgtagcccccccgcgacgcgacggcgagactgcgacggccggcgacgtcgctctcacgctggcgagagagaatacatcttcaactgccaacattaatttacatcgagagagaaaattagcagtagcatcaaataatatcatttcagtttcgtcgcaattaagctagctagccatgtgaggagtcagttcgatgcctcgatcgatcatcgatgtcgaagaggggtcaagaactcaagattaggcgatcgattccatctgacacatcggctgaatcatacgagctaccgtcaattgagtactcgtactaacgtacgcatgtaaatgctactgactgcatgagagaaactgtacaagtcctgtgcttacacaatgtactacggcctagccatgatctagatgatgcagcacaagaccttttaattaattagtcgatcgacaagcgatccatgcatgcatgggagtaatttacaggcttcgagttcatacactgttgcattgcgacttgcgaaaaacacagtgctacactgagaattaatgatggccatccgcagctaagtgatgatctgtgagcaattagcaattacaagttactgacgagaggtgatagtaggtaaaggcattattagcaagaactgcatcagaacaaagttcattccggtggtcaaaactcaaaaccccagcgagctgaggcgtgagagcgacgtcgccggccgtcgccgcctcgccgtcgtgtcgcaggggggttacgtgttggtgcgtgattagatctatcaatccatccgtgccgcccacgccgtcagacagccacgcgcttgcggggtcagaaatgcgcgcggctgcacggctgcgccaagaggtggagctcgccgccggcggcggctgttgcgtcgccggccaccaccgtcggacctccccgtgacccagtgagccatggcgcctggaggctggagagaggaggggagagagatggagagaggggagatggaaagggaggaggaagaagatgagagggggtgagtatgacatgtgggcccacgtgggtcccacttttttttatatcgaattgccacgtaagcgccacgccagatgaagaccgagtcaaattagccacgtagacaccacgtcagccaaaaccactatcaaaaccgccgagggacctcgtttgcccggttttggtaagttgggggacgggtcatatccggttttgcggtcaagggacgaaaatcggactgggcgacaaatagagggacccaaagtgaacttattccttgtacatagataggagatggttacttggtggaaaaagtacaccaaaggtccctcaacttgtcatcgagttacaaaatcatcccccaaccgcaaaaccagatatagaacatccctcaacttacaaaaccgttcaatttaagtccttcggtggttttgaccccggttttgtcctacgtggcggctgagtcagcgtgagacccacgtggaccccacatgtcatggtgtacacgtcagcaccctacctctttccccattctctcccttcctcctctctctatattttctcaggccagcgacgggaggcgctgtggggaggaggccaccggggggaggggagaggaggaggtccggcggccggcgtcgcgccggcggaggcaacgccaccatccatatcctcgtggccgctgccatggtacaacgccgtcaggctcgtcctagaggcagtgcgcgagcacgtagagaccgtagaagtcggcggtgcgcgggctggcgatggcgacgcgccaagcagccgtcctcctccttgcgctgccgtccacagaaccttccgacttcggcgagctgcggtgctggaccgaggccgacggcaaggtgcacacattccgcgtcaccaccatcccttgttgagaaaatggacattttgccatgctcaaaaagcggtttcgctagaatgccattttgaaaacgtctttcgttaaaatgccaatatgaagcgtgcgaccacagtcactttgccattttttccattttctccatttttgattttatttttgctggaatgtggcttgatgagatgaaattgccatgagacacagcgagcctgacgatgtgaagctcgccggccaactggttgtagaagaactactccagctcaatcacggcgagcacctcggtgacgccgacgagcacgtgctgcggcaccagccaccacacatccatcggcaccgtcgcgtccggccggtccactaggccagtgtcgcaagccacgcggagccgtctcgcctcgacgagcgccgccacgaccgtggtgaggcaggctgttgccatgccagcaccgacgtgctggagcatcgtgatgccgtcgcggccaccgccagcgaggcgcctggcgagcggcacaaccatgtggtcgtacaccggcagcagtgcgatgtaggtgaagctctgcagccccgctgatggcatgacgaggccaccgccgccgacacgccgcttcattaattgtgctactctgcttggtgattggcgaatggagtggacacctgcgagacgacgacgacgaacactatgctggtcaaccagatcggaagcagccattgtcgtcgccgccatggccatcctcctcctccaccaagcttcgttgcgcaccatcgcgcgctccacgcgagggcggcgacggcgactagggtgctcggcgtcttccacaaccgagcgtggagctccaaggtcacagagaactccttatccccttcccctttcacccgactgccgttggtccccagcaactccaggagctccacgatgtcgcccatggcgtgcgcgtggtcgtcggggaggccattggggatggacatgaaccagagctgcggtgagtcggcggcgagagtggccacgacaccaccaaggcaccaaggcggaggaggctgtggtctgtgtggaggaaagtgacgtgaaggccggcgccgacgaggccggtggagaagtgcatcatgcagttgatgtggccttaccccagcgccgggaagacgagcacgtgcgccgccaccgctgtcgccccactcgcgccgctgggtccctgtggtcgtcgctgccggcgagatcgccatggccggagagaggagacgtcagggcgctcgctcgcttggttgacgcccgccgccggccacaacctgcctcccggccaccgccgctccgacggtgtccgagagagagagagagaggaagaggggaagaatgggaaaaggagaggtgagagagtatgacaggtggggcccgtgttaggggtattttggtccagggaaagcattctagtgaaaaatgatttcgaaaatacacaaaatggccaaaatggcaaagtggcggtgagcatgcgtttcatattggcattttaacgaaacgtattttcgagatggcattctagcgaaaccgttttttgagcatggcaaaatgtcaatggttctgtttggatcgaagggatattttttaagccctccctcaaatagcttaaattgtccaaaaagatccaaaagggtgagctaattgagggctatttggaaataacccactcaaaaaatctatcccacccaaggggtgttaattgaggctattttgggtagggcccactgaaaaattgtcttttctctctatctctctccataggaagttacattaaagaccaaatagctcttaaaataaccgttggatccaaacaacttaaggctattttattggagggttatttccttgtgctaaaaaatagctctcaaaataactcttggctagctctctaaacagggccaattttctcatcccaagttcccgacccaatgctacttcgtctgcgacatcgccgctcgggtggcggcgcgtgggctcggggcggccgacgccgttcttgagcatgttgaagcgatgcccgggatggggacccacacaatgtacttgcactcggcgtcgccgtcgccagcgttgcggttgccggaatggagccgctcaacggcgtcccggtagcgcgcggtgcccgggacgcaccaccggtggttggcctcgtaccgccgcagccgctcgaccaagtagaaggagaccgggaacggcgacggcttccaccgtgtcgaggcctcgtaccggttgaggcacgacgcctcgtcgaccccggcgacagaagcccactgaggagccggcctgccgccggcaacgacgacgacgacgattctttgaagcgatggaggtggactacggtgtggtggcggcggcgacgaggggcgttgtgtcacgcccggaatttctatccaaaattccaaacgcttacatgtgtgtgaaccctcgtacaggaatcagccgaggcatgcaataacaaattgataatagagtacaattattactctaattaataagcgaataaaatatcattacagatgatggagcgtggggctcctcaccgggaggccgcgcaggcccccctttgccggttcggccgggggcgctaagtgaggttcttcgccctcgatctgaggaacgtcagcgagagaagaaatgcgcaagacacgggcgacgtagacaggttcgggccgctgagaagcgtaacaccctactcctgtgttctggtggatctgtgagtgaaggaatccacagactcgagagagttcaggttctagcaaacattcgccagagtcccccctcccctttcgtcctctcctccccccctttcttaggcctgggcctcctttttatctggtcaggggtcaccacatgggcctctagctacctaagaaaggtaacatgcttttacaatgagggctagtctacagccggaagtgacctctgacaagccgagcgcacgtctcttgctccgctcgcccctcttccggtggacgcccatttcaaccttcatttaatggccagcgacttccttgccatacttgcgctgaagcctggaatgaatctgaccgggactgacatacccactcctggagttggcacgccggctctggctagggacgagagccaggaagctctcatcattccgacgggacggggcgaggcgtgtgacaggccgcctgttgccacctaacccgcgatctgaccggtctgtgaccagtaactcaccgcgaccggtcacggaccggataagcgtacgctgcgccgcattaaatgcggcgtggtgcgctcgtccaacctgctataaatgcggttaggtgagcccgctgtgctcacctaacccacacacgtggcgccaaaaccacagggggtcggggcaccccagccctcggggccgaaacgggagcggcccgacccctcggggagacagagggaggggtggccacgtcaccttagggcccgactcccccgagggggtcaggccacgtgggtgaccgcggctacccaggcctctggtcacgatacccccggccccatgtcaccgacagtagcccccggcgttacgccagggcgatcgcccccctcgagagaagcgctcgagcgtgacgccactccttaggcccggtgacaggtggggccggttcctacaggcgggcagaaacccagcggtcgcaaatcgcgcgcatcggcaagggaaaactgaccgacaataatgagcggcctctttaagaccgctacattactcgagcagcgcgcgaatcgggacgagccggttcgtttcgcctggagacatgacgatggcgcatttcacggttggcgggcgtagttaatgcgcgcacgatctgccccatctcgactgccacggttgcacatctgccgcatgcgccgcaaacgggcgagcggggttagtggaggcgtgggcgcgagagacgagggggcgaggtagtgggcgcgggaatcgaggagccgggcatagcgttggaaaggtactaagacgccaaggaagggatttgtttccttcctctcgccactcttccccttgcctttgccacttgtgctctgactctctgtttccggcgccctacccttgccatactcgctcgctctcaagctccttctccgccggcgtcatggcacggggctccgcaccgctcgagggtagcgtgctgccgccttcccgcatcgtgagcgagaggcaggccgggctgccgcgccgattcatgctggaatctgccaccggccgggaggtggtcgcgctgggcgagggacgcctggcgccgcactacccggggcggtccatcttcttcctctctttcgcaatggcggggctggtccagccattctctatttttttcatggatattctggagttttatgatctccagatggcgcacctcacccccaacacgataatgacgttggccatcttcgcgcacctgtgcgagatgtttgtcggggtgcgcccatctccccggctgttccggtggttcttcaccgtacagccggtgtcgccgccgacggtagtcggtggctgctacttccagccacgggggcaggtgctgaaccgctacattccctgcgtcctccgcaaaaagtgggacgactggaagagcgattggttctacacccccctcgtcgacgaagcgcgcctccgacttccgagccagcccccggcgcaggcctccagctggcgggcgacggtagatccgggagatggctacgacgccgttctcgaccgcctggcgggtctacgatcccaggggctcacgggggccatggtgttcggcgactaccttcgtcgccggatcgcgccgctccagcggcgcgcccggggcgcctgggagtacaccgggcccgaggacatcatgaggacccaccaagggcgtaaatgggactgggaccctgaggatttcaggatggtggtccaacgggtgctgaatctcagctccgtggaggcatccctcatcccccaaggggtcctccccctctgctgcgatccagagcgcgccaacatcctgaccatcatgcaggaggtcggggcgtcgggggagcgggccccccgaggccacgatggcgcgggcgggagccgcaagggggaacaacctaccccaggagggggtcgtgcttctgggccccgcgacgggggcccggggggcagccgccctgccgacgcccgggggaagaggaagcaggagggaaccccttccccatctcctccccgtgggggcggggcggtgcgtgccagcagcaggcgcccggagggtgccgcgtcgacgccgcagcccgagcgggagcgaaagaggaaacggctccgcaagatgggggggatcgcgccatgccgggggaacctcatctcgcccccaaggtggtcgtttagccgacctccccgcaggtttgtccccgcgcccatcgcagctatattcattctcccatctcccaaggcaagttttcactcacccgtttctttttgtcttctggtttttcttccgcctcagcgagatcccgtcgccccccccccccccccccccccccgcccttccaagtccggccggtctgaggccgaggagacggcgaccatggaggcccggaggcgggaagctgaccggcgagaagccgcggaccgcctccgggaagccgaggaggctgcccaggaggccgcccgggttcgccaggctgaggaggccgctcgggaggaggccagactccgccgggccggggagtacgtccgggaggcagaggcggcgcgcgcacgccaggcggcctgccaaacctccgacccgactccgcccgaggggacgacaacttccgaggccgcccacgacgaggccgcgggcgcgcggctcgggcccgacccctcgggcgacacttgggacgagccagcctcgagggacgcccagagtccggcacgtcgatcggcgggccgagccgcgcggcgcccacaccgaggcggctctcccctctgtcttccgctgccccactgagcgcggagcccttcctgcaggccttggccgccgcgaacagcacggtgctagacgggttaagtgcccagatggaggccctgcaggcggagcgggcggagctcgacacggcgtgggcgcgcgtcgaggaggggcggcgctcggtggaggccatggtggaggcgggccgcaaggcgcaccgccggcacacctcacagctcgaggcccgtcgtagggagctggcggagatcgccagggaggtggaggaggagcggaagactgccctcatcgccaccgccgtgctcgacgaggcgcgggacgacctccgcctccaatacgggagccgggcggcggagctagaggagaaactcgatgccgcccggggggtccttgatgccgccgccgcccgggaacggcgggcggcggagaaagaggcggcgtcccgccagcgcgaagaggccctcgaggttcgcgccacggcgcaggaggagcgtgcccgcgccctggacgcgaaggagagagacctggcggaccgcgaggccaccgtcgctacccgggaggcaacactggcggtgcacgaggccgcttgcgccgaagaggagtccgcactccgcttccgcgaggacgcgctcaccgaacgggagcgagctctcgaggaggccgaggccgcggcgcagcggctggcggacagcctgttcctccgcgaggcagcgcgggaggagcaggcgcgccgcaatctggaaggcgcctgcgccgagggggccacactggatcagcgggccgctgagctcgaggcgcgtgcgaaggagctggacgcgagggcgcacagcagcggggcggccgcgggccacggcgacctagccgcccgcctcgcagccgccgaacacaccatcgccgagctgcagggcgcgctggactcgtccgccggggaggtcgaggccctccgtttggcgagcgaagtagggcccggcatgcttcgggacgccgtctcccgtctagaccgcgccgggcggcaggcgggcctctggggcgggcggcacgcgaagtacgccgccaaccaggggggcctcgcccagcgcctctcagagatgaccggggccctcgagcggctccccgaggagctcgaggagacgatcaagtcatcctcgagggacctcgcccgaggggcggtggagctcgtactggcaagctaccagggcagggaccctgacttctccccgtgggcagcgctggaagagttccctcccgggaccgaggacggcgcgcgcgaaggtccgggacgccaccgaccatatcgtccacagctttgagggtacggcccctcggctcgcgttcgccctcgactccgacgaggagggcggtgacgacggtgcggacgacagcgacgacgaggctgacgtcccgggcgtgtcggagtgagcccccaggcccccgccaatcttaataacttttgcttcttcttccgaggccttcgggcccccttcttgtatagactgatttaatctgtaatcaagtaaagaggaaatttccgcgtcagttctgtttgttgtgtgtatgagacgaggatggtctgtgccgcggtccttctttgtcttggcttgaacaagggctcgtgcccaggtcccagcctcaaacggcgcgggtcggggctagtgcctggggagatccacgtgtcgagactggccaggccgggagcgtggtgaccgagggttatggatgacccgattgtgggcctttgccgattcccccctggagttcaccacgccccgggacacggctcggttctgggccccgtttggcgattttagccggcccgggccgccgagggcagggtcgagcacgagcgtgctaattcaagccaagattcttcaaaaggaaacgatagcacagacacaatcctcaggaaatcaaaaatgcttttattgaaatacgggagagaaaaaagataaggatatgcatgtggtagcccccggccaaccctgcacgccccgggagggtgcggggttggcccgagcccgaggcatgacacccgacccccactaggggtagaagcgacgaaggtgttcgatgttccatgggttaggcagctccgtgccgtcgcccgtggccagccgaacggagcccggccgggggacgccgatcactcgatacggaccctcccacattggtgagagcttgcccagtccagcatgcgtttggatgcggcgtaggacgaggtcgtcaacgtagagtgatcgggcccggacgtggcgctgatggtagcgccgcaggctctgctggtagcgcgcggctcggagggccgcgcgcctccttcgctcttccaagtagtcgaggtcgtctcggcgaagctgatcttgatcagcctcgcaatacatggtgacccgaggggacctcagggtgagctcagatgggaggaccgcctccgcgccgtagacgaggaagaaaggcgtttccccggttgctcggcttggcgtggttcggttcgcccagagcatcgctggcagctcctcgatccacgagtcaccgtgcttcttgaggatgttgaaggtcttggttttgaggcccttgaggatttccgcgttggcgcgctccacttggccattgcttctggggtgggcgggggaggcgaagcagagcttgatgcccatgtcttcgcagtagtcgccgaagagctcactagtgaactgggtgccgttatccgtaatgatacggttaggcaccccaaaccgagcagtgatgcccctgatgaatttaagcgcggagtgcttatcgatcttgatgaccggataagcctcgggccacttagtgaacttgtcgacagcgacatacagatactcgaacccgcccggggcccgcctgaacggacccaggatatcgagcccccagacagcaaacggccacgaaagaggtatggtctgcagggcctgggccggctgatgggtttgcctggcgtggaactggcacgccctgcaccgccggaccaggtcgaccgcatcgttgagagccgtcggccaatagaaaccctggcgaaaggccttgccaaccaaggtgcgtgaggcggagtgggctccgcactcgccttcatggacatcggcgagaagctcgacgccttgttcccgaggaatgcacttcaggaggactccgttagccgcgcgccgatagagggtcccttccaccagcacgtagcgcttggatatgcgccggacgcgctcactcccttcgcggtcctcgggtagagtcttatctgcgaggtacgcctggatctcagtgatccaagcaatcaatctaggggagctgggagcgctcccctcgggtcccgaggcctggactccgacgggcctcgggggccgttcaggcgcgtccgtcttccctagggggtcgggtcgcgccgacggctgggcgagccttttgtagcgcccgttccgtcgtggcgcctagcgggaaaattatctcttaaaaaccctaattgcgaaatttgtttctttgcttgttgtctagtgtccgtgccatctcaagatctcaatccccgatctatcgtcgagttcaattccgaatccaaatccttccaatcaaatttctccgcaaaagtctattttgcctcccccgaggtcgatgggccgaatctcgctcggcccatcttcccctcttccccggccccctctctccccgggcgctctctctctctctctctctctctctctcgcgcgcgcgctctcccatctctccccccccccccgctcggcctcgcccgtacgctgctcgcgcgtgcgagcgccgccccgagcgcctctctccccgctcccccgctcagcctcgctcgcacgccgtgtgcgcgtgcgcgtaagccgccgcgccgagcgccccctccctttcccctcgctctgccgcgcctgcagccgcgcagccgctcgtcctcgcgagccagcgtgtgcgcgcccgcgcggacgccgcccgttgcttcccgcgcgcgcgtgccgtggtggccgaccgcccggtcgccgccgccgtcagcctctgcacgcgcctgtcgccagtgtcgccgctccgctccaaaccgccccgccgtcatcgccgtcgtcatcgcccggcccccgcccctccgcgcgcaagccgccaagggacggagccgcgcccctcctccctctgccgcgatgctcccgttcccctccccctctttttcccgaatcggcaaaggggcaagcccctttctcccccttcttttcccctttttcctcctcgccggcgtcatcctcctgccgccgctttggctgcaagcgccgagcgccagctcgcgccttaaccgtccaatgtcggttcccctctcccaaaccgacattgccgtccatttaagcccaagccctcccctccaaactccctcattttcgcctccgcgccattgccgccctctgtttcgccgtcgccgatcgtcgttgcgcgtgtcggaggagccggcacgagcaaggacgcggaagaggactccggccacgccctctccttcctcttccccggcccgaggccggagagattactcccgcgccgtcggcctctcgtcacagcgccccgacccgcacggtagtgcctttctccgttcttcctcctcgctccatcttccccccttagttttcggtggtagcacgagtagcctccccgtagctagccggcgccgccccgaccgttgccgtcgctcgccgtgtgctcgccgccgtcgccgcccgagctccgtagcacccgctcgtcgccggcctcgctcggcgtagttccgtccaatccgacgctagcgtcgagttcccgacgccgcgtagatgctctcaccgccgggaatcgacctctcgtgacctcgtcgccgtttccctcttctcccgccgccggttgccgccgccgcaatccgccgccgtcgagcaacctccggcgaatccgagccgttggctcgtctccccttgtcacgtgcaaccgcccggtgtgcacgcttttgcccgtatcaccgtggttcgctccgccgctcgccgccgccgcccgccgtccattcgcggccgggtcgtcgtctacctcccgccggcccgcgtggcagccacgtaggcgccacgtcggcgccagctcagcctagaccggatcgagccgaccccggtcagtccctccccgtgcgcgcgttccaccgcgagccgtgaggctgcgcgtgggcccgccgcacctgcgtccaccgcggaccgcgcgcatgcaccgcgtcccttccccgcccgcgcgcgtgcgtcgcgtgctccctccgcacggtgagccgagccgctgacaagcgggtcccacccgggaccgcgcgtggtgagcccggtccaccggctctctctctcctccctcccgcgcgcgcgcgagtttgggccgccttgggccggccggcccatttagctcggccagaccgctccatttctcttgggccgcgccctagccgtccgagaaaagtctatattccctccctcccttcttttctttttcttttccaaaaaaggatttaaataaatcctttttcctttagaccaaaaatccaataatcttagaaattcaatatcttcccaaccgtaaatccgattgactccgttcaacttccaaaattcctcaaatctcgagatctatctaatggcacgcttagaggtcattaatagggctttattttcgccgtttgttgagttgtcccgtttcgcgtgtagtttcggagcccgaagacccgtagtgcgaggatttcgaggatcaagctccggatctcgagcaaggcaagccacctttgaacatcttgagcctatatttgaaatttaattatattgcttgcgaaatattatgcattgataggatcacacttaatctgttgtcccgtctgcaaggtagattggcagacctacctaatttgttacatttgatccttcctttgttaattgttataccatgtccccttgtaaccacccagttgcgcctcgatattcgtgcactctgtgcgagtatcgacggtcgccttcaaacttaaaatctgagtaacaacttgggtaaaactcgagttttacaaaagacttggaaaacccgacacctgggtcggtgcttgcgaactaaatgaatttccaaaaccgcggaccggggaacataccgggtgtacggtttcccgctctcgcacttaaggaccgattcccttggaatttcatccaaacataagacaagtacgaccacatgggtggaatgggacacccctggctgagtaactagcttatcaggggagccttgatgccgagagacatgtggattcgccggggtggtgtcggggaggacccctgggcttcctggcacagtatggtctgggacctaacctgttgttggtctgggacccctctcgtcggcatatggtaaacctgtatcggctttcgaaatgccttgtcatgaaagcttggaggtctcccgacgtggctgatccccacgggctgggtgatccgggttagtaatgtcgtgtgggtaaagtgtaccccctctgcaaaggttaacaaactgctcgaacagccgtgcccacggtcatgggcggatgtgaggtgattcctagcgtagttttgtttgactactgcttgtgaaattgctgttgtgaaaaggggttcgatgtttgaaaaatctgcagctgatgggatcagctaggcccgggtggccgtttgaaaagttgttggcccgggtggccgtttgaaaagctgttggccgggtgccaaccttgttgcaatcctaaagactgacacattgcacatactccgaccggacgagacgcactgtctcatccgtgtcgtttgagaagcactcacttagactttttagaaaagagttcaaacaaaatcaattacgaaaacaacggcctttccttgaagcctgcattaaacacttatttcccctggcttgctgagtactcccgtactcacccttgctctatataaataaccccccccagttgctgaagaagatgaagtggatcctgctgacgaggagttcttccaggagcaagtcggctacgatgagttttagggtttcggcctagttcccaagtcgcgcctgtgatgattggtccaagtcctggcttccgctttcctttgtaatgcagttgtgagctcgggatctgtccgcagcccaacatgactgtacttctactctataataaagagacctctgttgctgtgatactctgtccccctgtgataccagcactgtatcctgggactggtatcgattaacaggttaatttggagcgtcacgggctagttccggtcgggactagttcggggcgtgacacctttcttcaaaggcgcccagtggggtctgggctcgcgaggaagcgagccttgagagtccgtcggcgaccacgttatcccgtctgggcacgtgccgaagttctatcccgtcgaagtggcgctccatacgccgcacctggcgcacgtaagcgtccatctgcgggtcagagcaccggtactccttacagacctggttaacgaccaactggaagtcgcctaacaccaggaggcggcggatccccagtccagctgctactctgagtcccgcaaggagtccctcgtactccgccatattgttggtcgcccgaaagtcaaggcggaccaggtatctgaggacgtctccgctcggcgaggtcaacgtgacccccgcaccggcgccctgaagagatagggagccgtcgaactgcatcacccagtaggcggcgtgaggcagctgcgaggggtccgagctagcctcgggggcggagacgggctcgggagctggggtccactccgccacaaagtcggcgagggcctagctcttgatcgcgtggcgtggttcaaagcgcaaatcgaattcagagagttcgattgcccatttcaccacccgtccagtaccctctcggttatgcaagatttggccgagggggtaagacgtgaccaccgtgacccgatgcgcctggaaataatggcgcaacttcctcgaagccatcagaatagcgtaaagcatcttctgggcctgagggtatcgggtcttggcatcccggagggcctcactaacgaagtagacgagccgctgcacctttcggcggggccgatcctcttcgccaggggccgcacctccagggcgctcttcgtccgagaggccacgcggggcgcactcggcttctgtgccgacgacctcggggtcagagggcgacaggcgcggccttcccgcagtggccccggggccatcctgggggtcgggggcgcctggcaccgtcggacaagcaggcggagggccagctccggccgtcgggggcctcgggccgccgttcggctcggggacctctcctgcctgctctctcccgggtcgagtcgacgcagggtggggatgcgcggagtgagggttgtcctcgtcgcgctccacgaccaacgccgcgctgaccacctgcggggttgccgccaggtagagtagcaacggctcatctggctccggggcgaccaggactgggggagaactgaggtacgccttcaactgagtgagggcccgctcagcctcctccgtccaggtaaacggcccggagcgtttgaggagcttaaataggggcagtgccttctctcccagcctcgatatgaaccgacttagggcggccatgcagccggtgacgcactgcacatccctaagcttgctgggggggcgcatccgctctatagctcgtatcttctcggggttggcctcgatgcctcgggcagagaccaagaacccgagaagcttgcccgcaggcacgccgaacacgcacttatcggggttcagctttatgcgggcggagtggagactttcgaaagtttccgctagatccgagagtaaggtctcttggttgtgcgtcttcacaaccaagtcatcaacataggcctcaacattgcgtcctatctggctacccaaagaaattcgagcagtacgttgaaaagtaggacctgcattctttaacccgaaaggcattgtcgtataacaataagttcctataggggtaatgaatgcagttttttcctcatcctccctagccatgcgaatctgatgataaccagagtatgcatctagaaaacacaaaaggtcgcaccccgcggtggagtcgacaatctgatctatgcgtggcagggggtaagggtccttaggacatgccttgttaaggtcggtgtagtcgatacacatccgaagcttgccgttcgccttgggaacgacgaccgggttcgccagccactccggatggatgacctcacggatgaatccggcctccagaagtcgcgccacctcctcgcggatgaaggcttgacgttccggggcctgccgccgcactttctgtcggaccggccttgcgcccggccgcacggcgagacggtgctcaatcacctccctggggaccccgggcatgtccgccggtctccagacgaagacgtcggcgtttgcccgcaggaaggagacgagcacgtcttcctatttgtcgtccagaagaccactgattcgtgtggtcttggacgggccgtcgcccagggcaacctccttgaccggaacctcgtcgcacgtgaccatccgctgccttggggcggccgggacggaggtggtgagcctctcgtcgccacccgcgggcttggacgccgcggcgaggtggtccacgcgctgctccatacaagcaagcgcgactttgaggtcgccatggacggtgatggggccaccggggcccggcatcttcatctggagataggcgtagtggaccgccgccatgaacttcaccaacgcgggcctcccctggaccgcgttgtagggcagactgaggtccgccacatcgaagtccacccgctccgtgcgaaagttggcggaaccaccgaaggtgacagggaggtcgatatgacccagcggccaggtgtgccccggcgtcacaccgatgatcggctgggacggccggagcaccatccccggggccttgatggcgtcaaaggctacgggggaaaggatgttgagggctgcacccccgtctatgaggacacgccccaacttcacattgcaaacggtgggggaaaccaccatcgcgatctgtcctccccgggcaacgcacggcgggtggtcggtctggtcgaaggtgagggcaacctccgaccaccgcgcccgccgcgtcgcctcatgggtaggggccgcggccagaagctctcgcttcatggccttgaggctccggcgagaagcgtgagcgcacgctcccccatcgacggtggcgacggtggcctcaggctcctggaaccccaggtcatcgtcgccatcgtcgatgtcctcggcggtggccttctgcttggcctcacctcgccggttgccggcgggagccgccggggtcttgccctcacggcgctcctgcctcttctcctcctcccacttcctcgtccgctcagccaaacttttgaccgcgcggcagtccgcgaggtcgtggagggaggtgttgtgcacggtacaccacttgccggtcgggcgctccctgctgggagcgccggcctccttctttttgtcgctcgcaggcctcccctttcggggggcccgcgaagcgccctcgacggcgaggacgtgaccctcgtcgtcggaacgggccgaccccttcttcctcctcctgtcctgccgccctgaccgagcggcggacccgggggcggccggagctgccacaccagaaacggaagagttccaggtccaggcctcctccttgcgagccacacggtccgcgagctcaaaaagctgcgcggtggtttggggctccttggaggcgatcttctcgagcatgcggttgtgccgcacgccccccctgaacgcgtagatcaccgcgtgtgcggggatgcacggtatggtgttgcagacttgacagaaccgctgaatgtacgagcgaagagactcatcgtcccttcgctataccgcatgcaagtccgcttcttcgcctgggcgcggatatacgccctggaagttcgtggtgaactgctggcacaaatcctcccaagagtggaccgacgcgggtggcaagttcattagccaaccccgcgcctgacccttcagggccatggggaagaaattcaccatgaccctgtcgtcacccccggcggcctcgatcccggtcgtgtagatctggagaaactcggaggggttgacgcttccgtcgtatttttcggtgatggtgggccggaaccttgggggccaacggacgttccgaaggctcgccacaaaggctcgacagccggcaccgccaaccggggacacggggggccggcccccgtgcccggaccgaagtggcgctccggacgaggaaacgccctccgttgcgtgggcggcgtgatgagcgtcgcgccggcgctcgatatcgaggcgggcatccggatccccacgcatatctccttgggtcggaggcgtcgacgagggaatggtagacaaacggcgggtaacggccgccgctcgccgcgccctccgcctcgacgacgtggagccggcggcgggagcgccggaggtctcggtggcggaggaccgcccgccggcgcctaggcgctgctgcgccgtcatgaccaagtcggccacatcatccagccaacgccgggctggagtctctggatcggggacgacgggcgggtgacgcaggagcgcgcccgcagcctggagcgcgccctggggcgtgccgccatcgccgtagacgaggcggcgacgcgccccgtctcgccgtcctcccccgtcgcccgcgggcggcgaagtcgcggatcctccggcctccccgagcacctccccccgcccaagatttcagcgagagggggacggtggggtgcgagcccgacggcgcgggttctgctccccgtcatcaccgctagcgttcggagagaggctgtgcgcccctgcccgttcggccattgggctgagcgggagaagcttggcgcacacgaaagaggacgagggcttagaaagacacgcgcgccccctacctggcgcgccagatgacggagcgtggggctcctcaccgggaggccgcgcaggccctcctttgccggttcggccgggggcgctaagtgaggttcttcgccctcgatctgaggaacgtcagcgagagaagaaatgcgcaagacacgagcgacgtagacaggttcgggccgctgagaagcgtaacaccctactcctgtgttctggtggatctgtgagtgaaggaatccagagactcgagagcgagagagagttcaggttctagcaaacattcgccagagtcccccctcccctttcgtcctctcctccccccctttcttaggtctgggcctcctttttatctggtcaggggtcaccacatgggcctctagctacctaagaaaggtaacatgcttttacaatgagggctagtctacagccggaagtgacctctgacaagccgagcgcacgtctcttgctccgctcgcccctcttccggtggacgcccatttcaaccttcatttaatggccagcgacttccttgccatacttgcgctgaagcctggaatgaatctgaccgggactgacatacccactcctggagttggcacgccggctccggctagggacgagagccaggaagctctcatcattccgacgggacggggcgaggcgtgtgataggccgcctgttgccacctaacccgcgatctgaccggtctgtgaccggtcactcaccgcgaccggtcacggaccggataagcgtgcgctgcgccgcattaaatgcggcgtggcgcgctcgtccaacctgctacaaatgcggttagatgagcccgctgtgctcacctaacccacacacgtggcgccaaaaccacagggggtcggggcaccccagccctcggggccgaaacgggagcggcccgacccctcggggagacagagggaggggtggccacgtcaccttcgggcccgactcccccgagggggtcaggccacgtgggtgaccgcggctacccaggcctctggtcacgatacccccggccccatgtcaccgacaacagaggtagatagttcctctcaatcaataaagatctaagcagcggaaaaataagataaacggcgcagacgactccactcgacaggcagcttgaccagggctacacctaatcctccacaccatcagcatcactgtagaactcctcctctgatgaatgattgcaaggtgagtatatgacatactcagcaagccacgcagcaaatatgcaagtgcacaggataacaaaggatggcatagtagggtttcatttgcataaacagcatttaataaacatttcagaatttaataaaatagttaagtaataattaaacaatattaatccaacgctatacaacataccctattgcataggcccaaccattctaaacaaccatcccggctacacagttctatctccaaaccaggaatataccattccaaaccaggagctaatcaaattattaccagttatagcatcttttattatggtgagaagtgtgaaactaatcacgaaagacattgttagacccgctcttaaccgcgggcacggctattcgaatagttttactctggccagaggtgtaccactgtacccacaagacacagacatgtcaccatgtgcctcaataccaccacggtacctcgaaaaggagctgtgacagtacccctcgcacaacacaatccaccacagtgcaccgttcctggatcataatcacccccttataaacaaggcatggactctccagcgacccctgtgggcttatctctgccacttctcagtctggtgctccgcaatgaaccatgctatacaaaaggtaaagccgttgcccacactggcttgtggttggcacgaataatgtttcacaaccgaaactcgtgaaccggtccttaattttcatgagcacgaccatcaaaaccatgtgctcacaacccaccattatcaggttttagttggcaaattaattaattaaccaatcatgattaaccatcatgagttatcattaagccatcattaaataatagtgagtcataagttatcccaatagtgtgctaatgtttcttagcatggctaagcaatcatatataatatctagctgaaccaatatataaagcccaactagtcaagttataataactcaaggtatcaaggaataaagtaatcaagaacaaaagggctataacaaacaataggttaattccacccaatgacattcgaaaataaatgcaatagttgaatagaaacaatagctttaaacgggatcaacatgctcaaagggttgtttgggatctgtgtgacttgccttgctggccttggaactcttcaaattcttctcctgcaaaaacggactctccggaaacgtcggaatctaaacatgtcggtgacatgggaccgggagtatcatgacttagagacctgaggcagacacgatcgcccacgtggcctaaccccctcgggggggtcgggcccgagggtgatacggccgcccttctctttgtcttcccgaggggtcggaccgctaccgcctcggccccgagggccgaggcgccccgaccccttgtgggttttgcgccgcgtatatggggtaggtgagcatagcggggctcacctaaccacatttattgcggtttggacgagcgcgtcacgccgcatgtaacgcagtgcagcgcgctcgtttatccggtctgtgaccggtcacagaccggtcaaatcgtgggttaggtggcgacaggcggtctgacgcacgcctcgccccatcccgtcaggacgagagcctccaagcactcgtccctagcccgaaccggcgtgttagctcctggagatggcacgttggttccggtcagatatatgccaggcttcatcctaaccattacaggcaagatattgtatgaagaagggcgaacatgcagattgttaaactgacacgtggtggacaagaatgaccgatttgtgaccggtctgacaatggtcatgtcgtcagcagacagccatgttcccacgtcgcgcctgcttccggcggaagtggaggtaggtatgggccgtcccatcagaaggtcattcggacggcaaccatacaaatctccgtccattaatgaagagaagtcaagtaagaaagagatggagagatggtgcatgtggtatccccttgagatataaaaggaggaccttgcccacttagagagagaaaaaggaggaaaaaagaacgatcccaggacaatcgagggctggctcacactttgtagcttcttcatacacagatccaccaaaacacaggagtagggtattacgcttctcagcggcccgaacctgtatacatcgcccgtgtcttgtgctttttccactctcgcgaactttccacagaccaagagcttagaacctcacccagggcccccggccgaaccggcaaacgggggcctacgcggtctcccggtgaggagccccaagctccgtcatctggcgtgccaggtagggggctctgcgagtgatcttctgagctctcgcactctttcgtgtgcgccaagcttttcctgttcagcccaatggccgaacaagcaaaggcacacaacctctctccgagcgttagcggtgacgatggggagccaaacccacgccgtcgagctcgtactccaccgccccctccacgccaaagtcctaggagggaggaggtgctcgagagggtcgaaggatccgcgacttcgacatccacgggtgatggagaagggcgccgagatggggagcgtcgcctcctcgtctacggcgacagcagcacgccccagggcgcgctcctgcgtcacccgcctgtcgtccctgacccggagtctccagcccaacgatggctggacgacgtggccaacttggtcatgacggcacggcagcgcctaggtgctggtgggcggtcctccgccaccaagacctctggcgctgctaccaccggctccgtatcgtcaaggcggagggcgcggcgagcggcggctgttgctcgccattcggccgccactccttcgtcagcgcctccgacccaggaagatctgcgtggggggccggatgcccgcatcgatatcgagcgccggcgtaatggccgacgtgctccccacgcaacggagggggcctcctcgtccggagtgtcacatcaacacggacgcggggatcagccctccgtgcccccggttggtggtgtcggctgtagagcctttgtggcgagccttcggaacgtccgttggcccccaaggttccggcccaccatcgccgaaaaatatgacgggagcgtcaaccccgccgagtttctccaggtctacacgaccgggatcgaggccgccgggggtgacaacagggtcatggcgaatttctttcccatggccctgaagggacaggcacggggttggctaatgaacttgccacccgcgtcggtccactcctgggaggatttgtgccaacagttcaccatgaactttcaaggcacatatccgcgcccaggtgaagaagcggacctgcacgcagtacagcgaagggatgacgagtcacttcgctcgtacattcagcagttctgtcaagtccgcaacaccataccatgcatccctgcacacgcggtgatctacgcgttcagggagggtgtgcggcacaaccgcatgctcgaaaagatcgcctccaaagagccccagactaccgcggagctttttcagctcgcggaccgagtggctcgtaaggaagaggcatggacctggaacccctccggttccggtgtggcaacttcggccgcccccggatccgctactcagacagggcggcatgacaggaggaggaagaagaggtcagcccataccgacgacgagggtcatgtcctcgccgtcgagggcgcttcgcgggccacccgaaaggggaggcctgcgggcgacaaaaagaaggaggccggcgctcccagcagggagcgcccaaccggcaagtggtgcatcgtccacaacacttcccttcacgacctcacggactgccgcgcagtcaaaagtttggctgagcggacgaggaagtgggaggaggagaggaggcaggagcgccgagagggcaagtccccggcggttccttccggcaaccggcgaagtgaggccaagcagaaggcccccgccgaggacatcgatgacggcgatgatgacctaggtttccaagagcctggggccaccattgccactgtcgatgggggagcgtgtgctcacgtttctcgccggagcctcaaggccatgaagcgagagtttctggccgcggcccctactcatgaggcgacgcgccgggcgcggtggtcggaggttgccctcaccttcgaccagaccgaccacccaccgtgcgttgcccggggaggacagatcgcaatggtggtttcccccactgtttgcaacgtgaagctggggcgtgtcctcattgatggaggagcagccctcaacatcctttcccccgcagcctttgacgccatcaaggccccggggatggtgctccggccgtcccagccgattatcggtgtgacgccgggtcacacttggccgctaggtcatatcgacctcccggtcaccttcggtggatccgccaacttccgcacggagtgggtgaactttgatgtggcggacctcagtcttccctacaacgcggtcctagggaggcccgcgttggtgaagttcatggcggcagtccactacgcctacctccagatgaagatgccgggccccggtggccccatctctgtccatggcgacctcaaagtcgcgcgtgcttgtatggagcagcgcgcgaaccacctcgccgccgcgtccaagcccgagggtggcgacgagaggcttggcacctccgcccccgccgccccgaggcagcggatagtcacatgcgacgaggtcctggtcaaggaggttgccctgggccacggcccgtccaagaccacacggatcggtggtcttctggacggcaaataggaagacgcgctcgtctctttcctgcgggcaaacgctgacgtcttcgcatggagaccggcggatatgcccggggtccccagggaggtgattgagcaccgtctcgccgtgcgatcgggcgcaaggccggtccggcagaaagtgcggcggcaggccccggaacgtcaagccttcatccgcgaggaggtggcgcgacttctggaggccggattcatccgcgaggtcatccatccggagtggctggcgaacccggtggtcgttcccaaggcgaacggcaagcttcggatgtgcatcgactacaccgaccttaacaaggcatgtcctaaggacccttaccccctgcctcgcatagatcagattgtcgactccacagcggggtgcgaccttttgtgttttctagatgcatactctggttaccatcagattcgcatggctagggaggatgaggaaaaaactgcattcattacccccataggaacttattgttatacgacaatgcccttcgggttaaagaatgcaagtcctacttttcaacgtactactcgaatttctttgggtagccaaataggacgtaatgttgaggcttatgtcgatgacttggttgtaaagacgcgcaaccaagagaccttactctcggatctagcggaaacttttgagagtctccgctccgcccgcgtaaaactgaaccccgataagtgcgtgttcggtgtacctgcgggcaagcttctcgggtttttggtttctgcccgaggcatcgaggccaaccccgagaagatacgagctatagagcggatgcgccccccagcaagcttagggatgtgcaatgcgtcaccggttgcatggccgccctaagtcggttcatatcgaggctgggggagaaggcgctacccttatttaagctcctcaaacgctccgggccgtttacttggacggaggaagctgaacgtgccctcactcagttgaaggtgtatctcagctctcccccagttctggtcgccccggagccaaatgaacccttgctactctacttagcggcgaccccgcaagtggttagtgcggcgttggttgtggagcgcgatgaggacaatcctcattccgcgcacccccaccctgtgctggcttggcccgggagagagcagagaggagaggcccccgagccgaacggtagcccaaggcccctgacgaccggagctagccctctgcccgcttgtcagacggtgccaggtgcccccgacccccaggatggcccgagggccactgcgggaaggccgcacctatcgccctctgaccccgaggctaaccctgtgccgactcgacccgggagagagcagggagaagaggcccccgagccgaacggtggcctaaggcccctgacgaccggagttggccctttgcccgcttgtccgacgacgccaggagcccccgacccccaggacggccccgaggccactgtgggaaggccgcccctgtcgtcctccgaccccgaggtcgtcggcacagaagacaagtgcgccccgcgaggccgcttggacgaagagtgccccagggacgtggcccctagcgaagaggatcggccccaccgaaaggtgcagcgtcccgtttactttgttagtgaggccctccgggacgccaagacccgataccctcaggcccagaagatgctttacgctattctgatggcttcgaggaaactgcgccattatttccaggcgcatcgggtcacggtggttacgtcttaccccctcggccaaatcttgcataatcgagagggtactggacgggtggtgaaatgggcaatcgaactttctgagtttgatttgcactttgaaccacgccacgctatcaagagccaggccctcgccgattttgtggcagagtggaccccagctcccgagcccgtctcagtccccgaggccaactcgggcccctcgcagctgcctcacaccgcccactgggtgatgcagttcgacggctccttgtctcttcagggcgccggtgcgggggtcacgttgacctcgccgagcggagacgtcctcagatatttggttcgccttgactttcgggcgaccaataatatggcagagtacgagggactccttgcgggactcagggtggcagctggactggggatccgccgcctcctggtgttaggcgactcccagctggtcgttaaccaggtctgtaaggagtaccggtgctctgacccgcagatggacgcatacgtgcgccaagtacggcgtatggagcgccattttgacgggatagagcttcggcacgtgcccagacgggataacacggttgccgacgaactctcacggctcgcttcctcgcgagcccagaccccaccgggcgcctttgaagaaaggcttgcccagccgtcggcgcgaccagaccccttaggggagacggacgcgcctgacaggcccccgaggcccgtcggagtccaggcctccggacccgaggggagcgctcccagctcccttagattgattgcttggatcgttgagatccaagcatacctcacagataagactctacccgaggaccgcgaagggagtgaacgcgtccagcgcatctccaaacgctacgtgctggtagaagggaccctctatcggcgcgcggctaacggaatcctcctgaagtgcattcctcgggaacaaggcgtcgagcttcttgccgatatccatgaaggcgaatgcggatcccactccgcctcgcgcaccttggttgtcaaagcctttcgacaaggtttctattggccgacagctctcaatgatgcggtcgacctggtccggcgatgcagagcgtgtcaattccacgccaagcaaatccatcagccggcccaggccctgcagatcataccactttcatggccatttgctgtctgggggctcgatatcctgggaccgtttaggcgggccccgggcgggcttgagtatctgtatgtcgcgatcgacaagttcactaagtggctcgaggcttatccggtcgtcaagatcgataagcactccgcacttaaattcattaagggcatcacagcccggtttggagtgcctaaccgtattattacggataacggcacccaattcactagtgaacttttcggcgattactgcgaagacatgggcatcaagctctgcttcgcctcacctgcccaccccagaagcaacggccaagtggagcgcgccaatgcggaaatcctcagaggccttaaaaccaagaccttcaacatcctcaagaagcacggcgattcgtggatcaaggagttgccagcggtactctgggcaaaccgaaccacgccaagccgagcaaccggggaaacgcctttcttcctcgtttacggcgcggaagcggttctcccatccgagctcaccttgaggtcccctcgggccaccatgtattgcgaggctgatcaagatcagcttcgcagagatgacctcgactacttggaagagcgaaggcggcgcgcggccctccgagccgcgcgctaccagcagagcctgcggcgctaccatcaacgccacgtccgggcccgatcactctgcgtcgacgacctcgtcctacgccgcgtccaaacgcgtgctggattgagcaagctctcaccaatgtgggagggtccgtatcgagtgatcggcgtcccccggccgggctccgttcggctggccacgggcgacggcacagagctgcctaacccgtggaacatcgaacaccttcgtcgcttctacccctaagggggatcgggtgtcaggtttcgggctcgggccaaccacgcaccctcctcgggcgtgcagggttggccgggggctaccacatatgcatattcttttttctcttatatctgtatttcaataaaagcattttcgatttcctaaaaggctatatctgtgctgttgtttccttttgaaggatcttgacttgaaataggtcactcgtgttcaatcctgccctcgggggctcgggtcggctaaaatcgccaaacggggcccagaaccgagccgtgccccggggcgtggtgaactccgggggggaatcggcaaaaacccacaatcgggtcacccataaccctcggtcaccacgctcccggcctggccagtctcgacatgtggatctccccaggcactagccccgacccgagccatttgaggactaggacctgggcgcgagcccttgttcaagccaagactcaaaaggaccgcggcacagacatcctcgtctcatacacacaacaaatagaattgacacaaaaaatttcctctttatttgattgcagattaaattagtttatacaagaagggggcccgaaggcttcggaagaagaaaagaagaaactatttaaagattggcgggggcctgggggctcactccaatgcacccgggtcgccagcctcgtcgccactgtcgcccacaccgccgtcatcgccctcctcgtcggagttgagggcgaacgcgagccgaggggccgaaccctcgaaactgtggacgatatggtcagcggcgtcccggacctgcgcgcgcgcgccatcctcggtccctggagggaactcgtctagcgccgtccatggggagaagtcgggatccctggcttggtaactcgccagtacgagctccaccgctcctcgggcgaggtccctcgaggatgacttaatcgtcctctcgagctcctcggggagccgttggagagtcccggctatctccgagaggcgctgggcgaggcccccctggttggcggcgtacttcacagtccgcccgccccagaggcctgcctgccggccggcgtgatctagacgggagacggcgtcccgaagcatgccgggccctacctcgcctgccaagcggagggcctcgacctccccggcggacgagtctagcgcgccctgcagatcggcgatggtgtgttcggcagctgcgaggcgggcggctaagtcgctttcgcccgtggccgccccgccgctgcgcgccctcgcgtccagctcctttgcctgcgcctcgagttcagtggcccgctggttcagtgcggccttctcggcgcgggcaccttccaaattgcggcgcgcttgttcctctagcacagcctcacggagggacgcgctctccgccagccgttgcgccgcggcctcggcctcctcaagagctcgctcccgctcggtgagcgcgtcctcgcggaggcggagtgtgcactcctcctcggcgcaggcggcctcgtgcgccgccagcgttacctcccggatgacaacggcggcctcgcggtccgccaggtccctctccacgacgccggcgcgctcttccagcgccatggcacgagcctcgagggcctcttcgcgccgccgagacgccgcctcggtctccgccgcccgccgttctcgggcagcagcagcgtcaaggaccccccgggcggcgtcgagctttttcgctagctccgcctcccagctcccgtaatgaaggcggagggtgtcctgcgcctcgttcatcacggtggtggcgatgagtgcagccccccgctcctcctccacctccttggcgatctcccccagcaccttccgacgggcttcgagctctgagacgtgccggcggtgtgccttgcggcccacctccaccatggcctccaccgagcgtcgcccctcttcgacacgcgcccatgcggcgtcaagctccgcccgctctgcttgcagggcctccacctgggcacttaacccgtccaacaccgtggtgtttgcgacggccaaggcctgcagaaggggttctgcgctcagtggagcaacggaaggcgtggggaagagccgcctcggtgaggatgccgcgcggctcggcccgccgatggacgtgccggactcagggatgtcccccggacctggcttgtcctaagcgtcgcccgagggagtgggcccaagcgatgcgcccgcggcctcgtcgcgagcttcctcggaagtcgtcgccgcctcggcctggcgaagcctggcctcctcccgagcggcttcttcagcttggcgagctcggacggccacctgggcggcctcctcggcttcccgtaggcgatccgcggcttctcgccggtcagattcccgcctccgagcctctgtggtcgccgggtcctcggcctcagactggccggacttggaatggcgggagggacgcgacgggatctcgctgaaacagaagaaagaccagaagacaaacaagatggatgagtgaaaactcgcgttgagggaatgaatacggccacgatgggcgtgggacgaacctacgagggggtcggttaaacgaccaccttggaggggaaataaggtttccccgggatggttctgtcccccccgtcttgcggagccgtttcttcttccgctccccctcgggctgcgacgtcggcgtggccccctccgggcgcctgctgctggcacgcgccgccccgccccctcggggaggagatgggggaggggttccttcctgcttcctcttcccccgggcgtcggcagggcggccgctccccgggcccccgtcgcggggcccagaagcacgaccccctcccggggtagattgttcccccctgcggctcccgcccgcgccatcgtgccctcgaggagcccgctcctccgacgccccgaccgcctgcatgatggtcaggatggaggcgcggtctggatcgctgcagagggggaggactccttgaggaatgagggatgcctccacggagctgagattcagcacccgttggaccactatcttaaagtcctcaggagcccagtcccatctgactccctggtgggtcctcatgtagtcttcggatccggtgtactcccaggcgccccgggcgcgccgctggagcggcgcaatccggcgacgaaggtagtcgccgtacaccatggcccctgtgagccccagggatcgcaggcccgccaggcggtcgaggacggcgtcatagccatctcccagatctaccggcgcccgccagttggaggcctgcgttggaggctggctcggaagtcggaggcgcgcttcgtcggcaaggggggtgtagaaccagtcgctcttccagtcatcccacttcttgcggaggacgcagggaatgtagcggttcagcaccggcccccgcggctggaagtagcaaccaccaaccaccgacggcggcgacaccggctgtacggtgaagaaccaccggaacagccgaagggatgggcgcaccccgatgaacatctcgcacaggtgcgcgaagatggccaatgtcattaccgcgttgggggtgaggtgcgccatctggagatcgtaaaactccagaacatccataaagaaagaagaaaatggcggaaccagccttgccattgcaaaagggaggaagaagacggaccgccccgggtagcatggcgccgggcgtccctcgcccagcgtaactatctcccggccggtggcagattccggcatgaagcggcgcggcagcccggcctgcctctcgctcacgatgcgggaaggcggcagcacgctaccgtcaagcggagcggagccccgtgccatgacgccggaagaagagatgtttgagagcgagcgcgtgtggcgaaggtagggcacgggaaacaaggagttagggcgcaagcggcgaagacaaggggaataatagcgagaggaaggaagcaaatctcttcctcggcgactttatacccttgccaacgctgtgcctggctccttgtttctcgcgcccactatcttgcctcctcgtttctcgcgcccacgcatccactaatcccattcgcccgtttgcggtgcatgaggtggatatgcggctgtggcagtcgagatggaacatctcgtgcgcgcgttaattacgctcgccgaccgaagcgccatcatcatatctccaggaaaaacgaaccggcttgtcccgatttttagaccggccccacctgtcaccaggccttaggaagtggcgtcacgcccgaccgcttccctcgaggagggcgatcgccctggcataacgccgggggctactgtcggtgacatgggaccaggagtatcatgacttagagacttgaggcagacacgatcgcccacgtggcctaaccccctcgggggggtcgggcccgagggtgatacggccgcccttctctttgtcttcccgaggggtcggaccgctaccgcctcggccccgagggccgaggcgccccgaccccttgtgggttttgcgccgcgtatatggggtaggtgagcatagcggggctcacctaaccacatttattgcggtttggacgagcgcgtcacgccgcatgtaacgcagtgcagcgtgctcgtttatccggtctgtgaccggtcacagaccggtcagatcgtgggttaggtggcgacaggcggtctgacgcacgcctcgccccatcccgtcaggacgagagcctccaagcactcgtccctagccggaaccggcgtgttagctcctggagatggcacgttggttccggtcagatatatgccaggcttcatcctaaccattacaggcaagatattgtatgaagaagggcgaacatgcagattgttaaactgacacgtggtggacaagaatgaccgatttgtgaccggtctgacaatggtcatgtcgtcagcagacagccatgttcccacgtcgcgcctgcttccggcggaagtggaggtaggtatgggccgtcccatcagaaggtcattcggacggcaaccatacaaatctccgtccattaatgaagagaagtcaagtaagaaagagagggagagatggtgcatgtggtatccccttgagatataaaaggaggaccttgcccacttagagagagaaaaaggaggaaaaaagaacgatcccaggacaatcgagggctggctcacactttgtagcttcttcatacacagatccaccaaaacacaggagtagggtattacgcttctcagcggcccgaacctgtatacatcgcccgtgtcttgtgctttttccactctcgcgaactttccacagaccaagagcttagaacctcacccagggcccccggccgaaccggcaaaggggggcctgcgcagtctcctggtgaggagccccaagctccgtcaaaacagaaaggagaaaaatcaccaaaacagcacacaaacaagcatgaacagtacatgtggatatttttaacatgtagatctcaattttagaaaaatttagagacttgaaccaactaaatccgagctaagatgaattagttatgaattttcaaagattaaatcggattaaaacacttatatggattttaattgaattatgacgcaataatgaattatttttgaaaaggaaaaaggaattattgcgtcagcggctagggttcgcggaggaccgggtgcacggcggcggttcacgagattggacggccgagatccatccatccaaaacggacggccaagatccatcggtccacgaccggcccacgggaaacgacgacgatgacgtcagcggtgacgtcaccaccggcggcggctcgggcgtgcatgctcgccggcgaacgacggcgcggcggcgcgaacggagagcacctacgggtagcggacggcacggcgaactcaccggtgaccaaagtagcggcggaggagcaacggacggcgccggcgatgaggaaaaggcggcggagacgatcgggtcgacggcgacgacggtgctccggcggttgacaacgacggcgaagggacggacgaggacggcgacgagacggcgaccacgacggtgacttccccgactgacggcgacgactggagcgacggcggcgcacggctggagcggtggcaacgacgacggcgcgaggactcacgacgctagggctctgtagcggaggacctgggggtgcttatcaaggggctagggcgcggcggcgaaggcccacggcggccggcaacgcgatggaaagattagggttcgggagagagagacgaatccgattcgagatcgaatccgcgaatttccaaagcgatttagacgatgtttccaaaagggaaaaggtagagtggatcacggggatcctttcccctcaatcaatttcaccggaaacggaaagggacggccggatttggaatggcggcggcggcacggcgcggctagggtttcgttgggaggaagacgacgatcctgacaggcgggccccacctgtcagcggcgaacgcgcgcgcgggcgggcagctgcgggccggcttgggccgagggagagagagagagatggattgggccgactttcggcccaaagccaaaagaggattttaaaaacctttttcaatttaaattattcattaaatgcaattccatttattaaaaatacttccttagctcaaataaatcctagaaaaatctaggaattatagaattaaacaaagtatttaataaaattttatctggccccattttatattggaatttattaattaaaactagatcttctcttctaggcttttaaaataaattctaataattccaatttagacaacaatttatatatttgggatttttagggtgtgacacgttggcggcggcggcggcgttggctgcggcgacgaagcggtgatgatggtggtgattctcgtgctcggaggagagtaggagaccatgggcggggcatggtggtcggagtcatgggcgtcgctaccgccatcgcagagcgaggtggaggccgccctcgccttctcccgcatcgccaccgccgcctcctcctttcccgccctgccgcctcatcgcccatctggatttcgctgttaactcttctcggagtctcaggccctcctctcatcttcctcgcgagtcgctggacgaggtcgccgccggccacccccaccgtcgccgtcggtggccggctcatcgcctctgcttccttcgctcgttgcccacctcatcacgggcttcctcccccttgccgaatcctagggatttctccgcgtcgaatccgcgcaccacctggacgccaacgctgcgatgcaggtacggactgcagcttcgcatgaagccggcgtcgtcctcgtcgccggcgtcgccgctgccgccggcccgtcccggcggcctccgccccagccgccggccggcctgccagaagagaagagaagagtgagtgagagagagagaatgggaaagagagaggaggccaacgtggccacactgacaggtggggcccacgtgggtcccacgctgactcagccgccacgtaggacaaaaccggaatcaaaaccaccgaagtactttttgtaaattgagggatgttctatacatctggttttgcagttgggggatgattttgtaactggatgacaagttgagggaccttcggtgtactttttccttacttggtcagccggctcatgtcacacaccacagcccacctccaaggcccattatatcttggaataagtccactttgactccctcaaaatatattgtaccctgaaccgcgcaatatcggatatcttgatcctccaactcttaaaatcgttgtaatttaactcccacaacagttttggaggacgttttcgctaacgcgatgctttgacccggtccaacagactgattcagcatgcaagaccggacccacatgttaatctcacattttcctctcccttccgtttctttattctcttctctttttctttcttcattatttttcccacacagttccacggtgaccccgatccatagcaacgatgtgtactacgttggcctcccctcctgtgcgtgaagaggagctggtcgtcagtggcccaaaccagttggacgaggataagaacggtctggagcagagatctaggaggcactcctcctactggtgagttgaggtcaatgggggtggacgggcggcggaggttgaggaagccggcggggcgacggcgaattcaaggcgtcgcgtgtcctttcttctctcaacgcatgtgtcttgcccgctgacgatgggatgcagcggcactctcatatctttggcggcgggcctcaagggagggctccatatcatcaccaacatcgctgacggcatggcgttcatgcacgacactctgtgggaggacggaggcaccaacacgacaaagctcgacgccaagacacccacggaggctaagagcatgtgcatgaggcgggaggacggaggcaccaacacgccgagttgggtgacggccgacgagtctcctcaagcttgaacttgtccacgtgtccccgttgtcaccgagttggtgaggaggggagcaagcaaccaccgtcagcgggctagacacatgcgttgagagaagaaaggacacgcgacgccttgaattcgtcgtcgccccgccggcttcctcaacctccgctgcccgtccacccccattgacctcaactcaccaataggaggagcgcttcctagatctctactccaagctagtcctatccccatccaccgatctgggccccagccgccgctcctcgagctgctgatcctcatctgccttgagtcaccgtgcaagtgtgtgggaaaaaagaaggaagaaagaaaaattgaagagaataaagaaagggaaggaagaataaaatgtgacactaatacgtgggtcattttcaattgttggaggggggttcaaaatatccggtattgcagtttagagatacaaatcagattagggggtcaaaatatccgctattgcggtttagggatatgaatcagattagaggtataattgagggagtcagagtggacttattccatatatcgtgcaatgcacagctctgttccccactccaaattgtagcccgcaaccaaagtcccatgtacaataattccaaccgggagctagcgagaccaacctctggctggtgattccgggcattgcctgcgaggaagcaaaatttcaactttctagcggaaataaaccgggtgttggttttcgttctagtggtgctcatggatgatgcagggattgctaatcttggcaactatggccagatttggcatccgtttgttcttacgacaaagtttcggcaaggttacggtccttacggacttacggtcacacggactctcattgatagtgcgaaaccattaacgaggctcagatttggcgtgcgattttatccctcgagccatgtgcagcagcatcgttcgtttgtacacatgtcaggacagttctcgtaccagtgagcacataaaaccacagcccacgtacgttgcatcttcgggtacattgtcctcctgttttgatctactccccttcagagctgtagtactcccctactgcgtgagaaatgaatgcgcacctgtaaatggatttccaccattggttctctgatctatttcaccgggacaaccgatgcagtgttcataagatccggccttaatgttcagctccagatcgaacggtctaatctccaggttctgcagcaaaaattcattcctgatgcgagttgtaccgggcagtaacacactagctgctcaacggcggcagaaagattgcagtgttgtgatgcgagtaatgccgtgtattgatcgatcctgaaccagataaatgtgggctgtcctgcatgatgttttcgtttacgctgctatgatcctgaatcagataaatgccgagcatgtcactacagttgtgcatgtcgtttacctttgctttcactgcttgggtagttaggtactcatctatcatgcacgtcccctcaggcaccacgcccccaccagaccatctatacgatgacatgattgagtgaacatgatttggagtcaaaacaatcctgcattcctgcgtagtatggttcaagttagaatttacttgaacagccaaccttaacctagattaacttcacccacattttgtttgtaaacaccactagttaacctggattatgtggttctggagtgaagcacacaagtggagtgcattagctatcttattccaccagattttctatgctaagggacctaatcaaaaggctttaacaattctaactgatctctccataacctaggattgcttggttggttagacatctgtatgatatgaggagtagttaccatgtaggattaccagggaatcacttcagagttcagaatcaactttacaggggtgcgagagatacagcaaaaagtaaactaataaggacaaaatagccaaaggcgcccagattttaatcacaagcttttgctatgtcatggcccttgtagaccctagtagctgcctgtgctcgtcttttctgaatattttacagtaacaggcctgttactctgcataacagcacagctttgtctactgaaaaagtctttgcaatgctgcccctgaatgtgatgatcactcactcactcaaacactcctcatatggcagtcatcgggtactcgaagctttgtttattcatctggttggtgactccatgaaccaatctgcatgcctagctctacctgcagtactgccatacctcacggttgcagtgtgaatgtgtgatagcacagtgttagagcttgcttaatagaacacctagttgtctcatttggaaacaagatggcagccacaaccggattcctttttgcatgtgagctaacaatgcgatcgcttgggggatttggtcactgtatggacccccacggctcgaatgctagctatattaaaaatgccattgccctacagtgttcacatctccctgttctgttcctcctgttcttaccctttcctctgcagcgtctcctgcggtaggtgaaactgtcaaagcaacagcgcagtggcttcagtcttcagacggccagagttacacacaggcttgcaaagcaaaagtaaaggtggttcggtagctgctagaagcttttaggcttcagtcttctgttttcgttgcttctttttgttgtttgctttggttaactagaagctgagaaatccaatcctgcaatggcaccatgacagtttcagaaaacaaaagtaaactgaacttagtagttgctgcaaaaatttgagcttttgaaagccaggagatgatcagagagttttgagattgtggaaagcacaagaaactgagaagggctgggtgtgaggaggagttgaagcagcctgagacacagaatgtttggattcaatttttttttctgccaaaaacatcacatcgaatgtttgacacatatatggagcattaaatgtggatgaaaaaatcaattgcatagttcgcatgtaaattatgagacgaatcttttgagcctaattacgtcatgatttgacaatataatgctacagtaaacatttactaatgatagattaattaggcttaataaattcatcttgcaatttacatgcagattctgtaatttattttattattagttaatatttaatactttaaatgtgtgttcgtgtaattttaaaaaaaattggtaaggaactgaacacaaccagagatgtccatgaggtgagggggtgtggcccagctcggttggccagtagttgaatgcacatttattctcctcgccactgcagaagcatttagcaagtgtcccaatcctggattcaagctgcagcgagtgggatcgagagaggagaggagaggggatggaggggcctgcaccagcgacacgccactgttgcggaagctaaccataaattggaaatggttaaaggcagcagcgtctcgccactgacgcggagtacgtgcatacgcggttactcacacgcctatagatagctagtagtagctcgcctgtgtgttatcctctcgcaggtttcagagagctacaagcttgcagcgaaggcaatacagtagtaacaaaaatcgccccagatccttctctcgtttcgtccggccgtggccaggaggacacaggtaaggtaaacaggttgctgcacgtacagtttcaggctttcagctgttcctgtttcattttcgagaatacgcaggacggcgtatctctgtactcctacgtaccaaggtgtttctgtgttttggtggtgtttggatccaaaaactaaactttagtccatgtcacatcggattttagatactaatttggagtattgaacataaactacttacaaaactaattgcataaatgaaagctaattcgcgagacaaattttttaaatctaatttatccataattagcatatgtttactgtagcatcacataggctaattatagattaattatgttcaatagattcgtctcgcgaattagtccagggttatgaaatgggttttttcattaatctaagtttaatatttctaattagtgtctcaacatccgatataatagggactagaaatttagtcccgggatctaaacaggaccacctccagactttcagttgttcccaggcgactatgcaatcatgcacacgcagctttccttttctcttaaggtgagtactgcaaagcatttgctgatgagattatcgccgatatttacacttccctgatgctgcgaacacagcgtaaattagtaatcgtctaatcggtgtgtgataaggaaaatcaaagcagtagccgaatatggctgatagtaccatgcatgcaatgtgtcatgcctggaaagttgcagctttgcgacgattgagaggacaataataacacagatcccagatcacactggtgatctgctcgcacaagtacgtagcatgcttgtgcgtgcacgctaaaccgatccaattattgtcaaaaaaaaattgaccagtactcgtaaggggcagatggatgcatcaagcatggcaaaagctgcacttccatgtggaactagagggcgtagagctgatagagagagcaggtagtgtgagctatttcgtcttccttgaggacccccatgcattcgatggctccaaacttgcaattccttttcgttgcagtcaattcggagcaagctgatgagagagagagagagagagagagtctcgaagtgtcgccatcctacggtgggcttagtgagcatattacaacagtacttgttttcactaggaaggacaatgattagcggcagctatataccctgccagcgaccaccatccaagttagcatgagttgacgacgacgtttccttttccttggggaaatgaaaaaaaaagaatctgaaattctgaatcatgttactttctgtgaggtgttactgtattctcgcatacaggagtatttgcttctgaattcgcgatgccaagtttaaacccatgcttctggtagcatgggaaatatggtgtgagcggaacagacaagtatttcgaaatcagcaaaaacccctaccacagctactagacaagatacatgacgcaatcaagctatggaagatatgtggagcaacaaatattgcgagattattcgcctaggatgtttattttattgtttagtagcttcttctttcctctccctttctctctttcaccgttctggtgatcttgtaaatacttttttctcccatacttaatataacactagctttgctggcttcagtttttaagaaaaaaaaaggcaagtttaaaccggatcgagtttaaacaattttgcatgagcactaaggccgagtttagttccaaactttttcttcaaacttttaatttttccatcacatcaaaacttttttacacatataaatttttaatttttccatcacatcattttaattttaactaaactttaaattttaacgtgaatgcaccctagctagttgcctgcaaggtcgtacgtacacacgaagctaggcagtgcactgacggatgtgaagccgacatgggcacggcgccacgggcatcaattcaactccgacaggaaaggactccgtgtttgtccctcgcaatcgcgtctcaccgtgctgagatcaacaacatactcaagctcatgttgcatgcagacacacagtcacatgcagcgatgcatcgctagtgactaggtcgacgatgtttgaaggaagaatatcccagtttccgtatataaagtacaccattttctccgcttgatctgcagttaattactcactgctccacaacgtggaacaatcgcttcccgtcccacatgtatagtgccattctgctgtgcataattaacttcagaagcttcagatataaggagttcatggcttcatgccagttgataatgagattttcagtattggtattgaagaaactaaaggccatgtttagttggctaaaatttttttttttagatatcacatcggacgtttgaccggatgtcagaatgggttttcggacacgaatgaaaaaactaatttcataacttgcctgaaaaccgggagacgaatcttttaagcctaattaatccatcattagcacgtgtgggttactagcacttatggctaatcatggactcattagactcgaaagattcgtctcgcgattttaatgcaaactgtataattagtttttatttttatctatatttaatgttctatgtatgtgtccaaagatttgatgtgatattcttgagaaaaaaaattttgaaactaaaccgggccttcgaggagccacacacgagatattagtacagtacagtacaagattcatattgcgagtcttagttgcaggttggtgtcataattatggtgaaaatgccaactaataaaaggtgctagagcagtaccgaacagttgcaaaatagcggttgatcacacaatcaacggcttcagctacaacagctaaatgctcaccaaagtttactgttgcttaaaaagggatcatcaacgctgggcccagacataatgttatcagttatggctaaatcgtaatcagattgatgtggccgtgaatgatctacctattgatgaccaacttcactatgctcaatgctaatcaaattgaatgaaaccaacgaatagacagggaacggcacgaacgtcacgatataatcatcttctggagccatgttttgttgctaatcgaattgaatgaaaccaacgaatagactgggcataattgttttttttttgcttgtatctattccccacccaaatcctctcgaatcatgcacaataaaatcgttcacaagtcatgcatcatttgtttacttggttttaaatcatgttacctgtaaatattatgcatatacagtagtatttcaatagaaattcagtgtgagaagagatctgccgttcaaccccccccccccccctaacaaagttttattgatagagcagaaaaattttacaatattataatcctgaaaggccgtaactaggaaaaagaaaaaaaatataccaccacccacacaccggcagcgcccacacacaggtccgggagaatgctagcaccaaaccgaccgccactaagcgtgaccggccaccactagtccaacaacggaacacagacgagatcgcccaaaaaaacacccttacaaccaccacaaagcccaactctatccacgtcttccggatttagggagagagggtgagagagaagatggaacatctctcctctctaggccctccgacgtgaccaacttgtagaaactaggacaccgctacaagaggatgagaatctagagcgtgcttgcaccaattgctcgagtggtttcgacaagggggatgccattcgccagggatgaaaacggtcgaaaatagttggaaacaatacattattttattattttttcgaaaatgaacggaaatggtcaggaaatttccatatttatgaattcatctatttagtgtcaacttcaatgccacactaacataaatttaaaaaactaaaatttgaaaatagtaaccatcggtaaaaatattattatcatattagttttccgaaaacggtatcgatacggtcggaaaattcccatatcattttcacccctaccatttgcccctattgctttgagcatgtgttgagggatatttgtgtcttttgtgtaatcaaaagaaaactttaattttacattttctaaacctacatttggaaaactattacaaataacatggcatgaaagtattttaaggggcaaatcttaccaacttttactagcgtgtcaaattcttttccgaaattcaaactgaacttggagtatttgggagtgggtaggaagtaaagaaacaaactactcgtaaatacctgcatgttgctgtcttatcaacatgtgagtgcctggcagaattatatttaaaaaaaagacaaggggaagatccttcctcttgctcaacgagattcttgcatatacactggagtactctctatacatttttctctcttgcgaacacatgcaaacacaaaaagctttaaccgtagctttgttcagtcttctactgctgctggccattctccctcccagtgtcacactctcaaagtctcctctcctccatcaggtgttacctcctgcagatcctgattggaatttggaccttctcctcctcctcctccaccacctcctccttcccagtctggtaaaatgtgcaggccataaagccctcgcaatcctagaacagttgcatttctaattcatgtatagtaggaaagaaatatatatattcctgctctgttctgttcttatcttttgctttgagccaaaaaggttagagcttttgtgttcttcccccacaaatatcccctagtgccttttgtttggccgtggtgtggaaaagcatatgaatgggggagcatctcaattggcatactgctgttgccccccagcttagctatccctttccatccctgcaagaacccttctttatagatctgtgcccttgctgttcatggaaccctgtgattgaggtctctagttttagtgtttaattaagctctccttgccttgccagcttttggatgatgcttacatcttactcctctattggttcttggataggggtttcctcatttggtctctcactcgcggtgtaaacaaagtatatgctccaagtaagctgctacttttagctgcttctctgattcttgagtgatctccaaggtaaagctcccctcacttgcttctagttgctgttcttggtttgagcaagaaattcaggctgtttttggagcagaaatggattgtagcagcattctctgctgcaattgatgctggtggttggaagaacaccaaccatgctgctctgtgtagtaagtagtggtagtagtagcttgtaaaaggacggtccattttgcagtgcagaaggagagggaggaggagatgggggagtgcggcggcggcgagtacaggtgctgggaggagcttctgccggacgcgctggggctcgtcttccggaacctgccgctccgggaggtgctgacggtggtgccacgggtgtgcaagtcgtggagccgggtggtggccgggccgtactgctggcaggagatcgacatcgaggagtggcggcagcagcagggcaagcccgagcagctcgtccgcatggtggagatgctcgtcgcacgcagctgcggctcctgccgccgcatcagcgtctccggcctccccggcgacccgctcttctccttcatcggagaccagtaagttttgttctctctctctctctgtttttttttattattctttttggttcagcgttctgtccgtttctgaatgattcttttaccgggatggttgaattccagcattttgatagcgctctctgatgtagtaaaatcctgaggttataaatgatcagcgattgttatttttctgtcagtagctgacatggtcatggatcaatctagtgcaggcagtaaatttggtttcagaaaattgcagaccgtaaaaagtttgtgtttccaccatttccccatggttaaattcaacatttttaccaaattttcagctttggagttcaggcaaaattttacagaccagctcactggcctctgattctgaactagtgaactagtggcttcagttcagcatccgtttcctactagtcgtagtattgattctttgaatttttttttttttgacatggatgtgttttgtggatgggaacatgtcgaattgccaccatgacacgaccaattcatattcccctcccaaaactttaacccttgttgattccggcttatcaccgtttcgctaaacgttggagccacaagtacaaactcaagtactgcgccctgcacggctcgcacatgcatacacccattctctccagtggattattcaccgttctctcctgctgccattgcacgtcttgcttgctgccaatcccagattcagtatgttctgcacgcagaatttcattaccgcgcgtgctctaatccatttccagcaattaactgtaactcaatggttaattatctggtttattactagcagtaattcttggtgctgaattttggtggtggttttgcaagtgcacgggcactgaggacgctggagattccacggagcgagatcagcgacgcggcggtggagagcgtggcgccgaggctgcccaacgtgacgttcctggacatcagcagctgcaccaagatcggggcgcgcgcgctggaggcgttcggcaagaactgcaagtcgctggtggggctccggcgggtgatgcacccgacggacgtcgccggcaaggcgtgccagcgcgacgaggcgcgcgccatcgcctgcaccatgccgaggctccggcacctggagatgggctacatggtgatcgcgacggatgcggtgctcgacatcctcgcgcggtgccgcgacctccggttcctcgacctccgcggctgctgggccgtcgacgacaagttcctgcaggagaggcacccggggctgagggtgctcggccccggcgtcgacgactgcttcgagaacagctacctggaggagtgctccgactactccgacgactcctccatctactcgtgggagctcatggaggacgacgacgacgactactacgccgtcgggagcgacgacgaggccatttgggacgacggccagggcctcgagaacctggaggtcaggttctacggcggcggcttcagcgagagctatgctggcttcgattggccaccatcaccatgaccatgagagcagctcagctcagctcagtccctgacctcactgtccttgctcttcctctcgagccgtgtacctaagcttgcagttgcagtctcgcagatgtgttgttgtactctgtgtgtgtgcgcgtgtgccagtgtgtcatcagcatcactagcttgcagtgcagatatgtgtgagtgaacttctacggctagttgttactactactacatccagatgtaaactttggtgtttacatgaagaagcaatgcaaatgcaatatgtggtgaaaaatcacctgccctgctcatgtcctacaacgaatctacaaaaactgtagcttgtgtgatctgttggttgggagtgttttatggagagattggcagtacaacgagagatgggcaatctgctgcctcatctattggacaagatgtgcagcagcaggtgtggtgtggcctgccttgctatgccagggagagcagtggagaagagagagtagagtactgcatctgcatgcccttgatttacgttacatgtcaatgctgctcccaggacaagcaaaaccaacagttaaaaagcttactagtgatccacttttaggccggtcggaccacggtgaccactgatttcacagttgaaaacaatgtggtagtgtagctggtaaagcaggatctttttttcaccggcagatggattgtctcttgcgaggcaggttactacaagccctggcattcccatgcgcctatgggcctctctgcaacttttgccgctgcaacactagtgtaggattctgcagtgtattcccaattcccatatataccagcagattattatatggagtacagtatactggttatccatcttgaggtatggtcaggtctgattggatgcctctggctaaatatttgatgctcttgttttgtacaaacattgagatcattgagtcaggattgtctcttaacattatgtgttactatatcaagtacagtagtatgatcctgtactgatccaggaatcacactgatcagggatacctcttctgcagcttggctgtaatgcagtgtaattttgttaagcatccttgcactgaactcaacagttaagacaaaaggagattagaagagagataccaagctggcactacactacagggacatccctggcaaatattgttgccgtttgcagtggcaataggaatcattcttgattaggctggtctgaactctgaaaaggatggaaaagggctgtgagctttctggaaatccacacaatgaacaccggcgttaggattgtttaaacgcggcttcagaatgggatgcctgtcctctttcaacctaatcccatgttcttttcgctttcggttttgtgttatccatgtgtcctcaccaccctcacctgccattctcttgtccccttgctttgctagctttccaagattcttttgttggaactcgcggttgacaatagtgagtgtctaggattgctaaagcttatcgtctcgctgagacggcctctgcctctgtaacacacagtaaaattcagctcctctggctctgtctcatgggagagaagaagattatccttgtttgggccatgcgacagaagaagattagcccttcatctcgggcctacgaacgctgacagtgaaacagcttttctccggagtaaacacgagctggctggctgagacctgggctgtgtttagttcagcgtaaagtttagattttggttaaaattggagatgatgtgactgaaaagttgtgtgtgtatgatatgttgatgtgatgaaaaaggactgaaatttggatccaaactttgaatctaaacacagccctgatgagatccaaggccctcaccattggacgatgcagggctacaggaaatggtgggagcccggatcggacggcgacgagacagcgtcgtgctttacgggctggtactggccgtctggccgtggccggtgatgcgagctacagcagttgctaaatcggaagcatactgtagcaagcagcctgcattcaagatcggatccaaacttacaggatatactagtatcagggttcagacgcgtaagtgttaacaccacaatttgatacggtttccaccggattcggtaaagaaaaaaaacgaatttaaagagggatcgtgaatagcacggcaagatactttcatatttgtaatatatatatatcttgatagactaaatttgataacaatccggtccagtagttcatagccacacccactcggtgaaaagcccaatctacctaggtgacaagggcctagctctgataccaaataataacaatccgacccaggtgggattggccgagacccaataacttaaggttgcccggaccccaacagttcatagacacacccactctgggaaaggcccaatctcactaaaagactagtgcaataggggaagggtggctctcccttttaaggtggcttcctcctcccaagctaagcaaggtgggattattcggaggctcacacggtcgccgctagacttttgcgtctttgccagcgggtaatagtggaggatgtcctcatcattcccacccccttaagaagggcctagctctgataccaaatgattacaatccgacctaggtggggttggccgaggcccaataacttaagattgcccggaccccgacagttcataggcacacccactcggggaaaggcccaatctccctaaaagattagtccaatagaggaagggtggctttctcctcccaagctaagcaaggtgggattattcaggggctcacacggtcgccgcccgacttgcgtctttgccagcgggtaatagtggaggatgtcctcatcaaaattagttattattattttattttctagttaggagtcttatctcatatcctactagattttgtaagatatttccacatattaataaaataaaattttggtgcatcgccaaccttttgccaggtttttgttttcgagcagggttgcgatggtaaagttcgatcttcggtaagacatcaagttcgggatcttgctttcgagttgggctgcatcattttgatcgccggcaagaaagtaatttccatcaactttgctcgtattggcgtgggtagaactttgtcggttagacccgatattctatttaagttgatgcaagcgtttttttatcagatatatttttagttacttcattgtctagagttgtatcttccaagagtttgaaaatttagcttatttaatgcataagatatagacgattgcaagaggtaaaggagaaagaaattttggactcataaatgctaggaagaagacacgtgaaagacgattgcaaaaggcaaaggagagagaaattttggagtcataaatgttaggaagaagataattcgaagcataagttcttatactccaaaattagggggcatatgttaacaccaaaatttggtacgattatttaatagattcggttaagaaaaacccaaaaggtagatggaagtttatcaagatcaagctgaatttaaagaggaatcgcgaagatcacggcaagagttcatatttttaagtatatctattaaataagcagattagttatttttcttttcttctcaggaaatattatctcatgtatcaacccgaagacataaatatatacacccaagatatttgtaagatatttccacatatcaatataattactttcggcgtatcaccaccttttattctgacgatttcatagtttcaagcgaggttgcatcgtttcaatcttcagcaaggaagtcaccaccttttattccgatgagttcatagtttcaaacgaggttgcatcgtttcaatcttcagcaaggaaataagtttcgccaacttgccgagttcatagtttcgagcgaggttgcatcgtttcaatcttcagcaagaaagtaagtttcgtcaacttgccttgttcttttcagttgtaaagcattatttcttggattacacaaaactacgaaagacgtatatgagcgcatacaccactatactcacatatcacaaactagagccgtatatagagctaactcggctcgactacccattatcttgttgtacgctctatgtgagtaagagcaggtacaatagaaggctataagccaactgcaaacatattttaagaagataaatgaggagagaagggcagcgggctacagatttgtaggcagctgtagcacggactccaagacacggactctaagacacagtgtatgtatgacaggtagaaccaggtattaatagtgtagtatgtaactattgtatgaatgagctattatattggttatagatgaattgaagctagtagttggctatactattaaacttgctctaacaatcagatccaatattttatcctcgaacactcttccattatatctctaattatatgggcctaaactgttacgacgtcgacgtacatgcaagtgtttatagattatattaccaacaatggcaaatcactagcaaagttgtgaacatgaatccatacttttttttgacattataaatccatactttgataccctcacacaaggtgaaaagaatcattgggccgttttataattttagttttgcagaccaaggattgaaaattttatgtatgacacatgatatatgatatctcgtgcaatagctttcgagcctaccccgtatagttcaaaaatctaacggtgattcttctttagatgaatccactgccaaaagttaaatatgatgagatttagatcagcaatcttgttgtacccaagcatcatcgcttctgataagggctgtaatcaaccatcacaatcccacgcttatatccagacatattaccaagtatggcaaaccaatatcatatgatgcaggtatatataatataataagataacactacgttttgcgtactgcagaaccaacgatacaagatactgataactagtgagcggacgttaccaaaatggaatatggtgggggtggaagcattcacccagcatgtctgctgggaaactaaaataccagatagtagaattatttctgggaccgacttggctgactagcgactaggcttggtgttgtgttccacgtcatgaaaacctcttacttcaaaagtatggcctgtagcgcattggacggcggaatctggggactctcctgaacaagaatacacaatatggatgttagacaccagacataaagaattagacatccatgttgtcaaaaaagctaaacttacccgtaaccatatggtgggaaatatggggccccatacgatctatatgggtaaccatgataaggattgtatccacgcggtggacgctgcttcatcccagggacattagtcctctttggtgccacctgttgagcacaaaacagaaattgagtaaattgcgaggacaaaaacatgtgaaaaggagtttttgaatccttcaggtgacaaaacagggatctgttggtaatttctgcacctttatctgacgaccatgcagttcagattcattcaaattcagagcctcctgaactgcttcttgttccagaaattccacataagcaaaaccttttggctgtccaaacttgtcagttaagatcgtcactctattgactgtgccacacgcttgaaaatgctgctgcacttcttctggggtacatgcataatcaacctgcggtaaatgatttgtatcactaagatgaatgaaaactaaatgtacatgtcagattagataatcagatgtgcttgcagactggtaatagaattaaaaaaatgcttatcaagtcaccttgataatattctgattttaaccggttaatctcaaaagaaccatttctgccttttaaaggtttcagtgtgctacataagatacctcggtacaatacaaaattgccatgcctgatactaattgaaaatttcacatggttgatacacaggtgaggaaatttcaggtcaacaaaaatcaatgtttaaagtgtgtttcaggctaaacccagtcaagatgacactttgggtgtaactaccacttcgaaagttggaaacattataaggggaacatcatataactgattatctaggaatatcataattgtaaataatataattgtgcccgtgatgtgacaaatggagtatgagaccagacatactgaactctgaagcgaagagaaaagcacaatatcatgctaacaaggcaaaaactagcatagatgatgcaatttctaggactatcgtacagtatagtctgtacggcaagactttcaggaaaatataaatgtcatagttaaaaggatttttgttaaacatatgcaagtgctgttaaattttcatacaaattactgacttccatagcatttactgaacaaaaggttaattttcatgatgtcacccatttgggctactagaatactgggtagcctttacttgcttgtaagaaaagttcaatgtagtccccacaaaacaatactgacatttatgctgacacatcagcaatgtcatcaagaataattaaggtggtcaatgaaaagggggcaaaagaaatagaaagatgtgctttgacatcacaagagaagtaaaaaaaaaaggaaagatggagatacaaagatgaataaagttaatatgaaggctccctaatattaggcttatatgtcatacctatgtgtattcaggtgattctcattggaccagtcgctaagaatcacatcacatcgtatgcaggttcgagtctcaagcaccaaggagtgtacagctgctttctagacttcctttgctccttcaaggataacctatcctagaatattcatgtttgtttttttcccttttttctttttcttttgcccatgctcttttttttttcctttttgcccatgctctttttatttttttcagggaatttctcttttttttttcaattctaagctaatactaaaatgcaggcaggtgttcaaccagatgccaattactcgatttgagaaaggcttgatctcagcactaccctgcggccatcaccattattcaatcaatgcaccaaaacaaggcatattcaccatatagccatataagatactatcttctactatcattagaaacagaacggcaataagcacagaggaaaaatcacaacaacagtacaaaactgtgcatggaaatttatgttttgttgttcgaatgaacagtattaagcatggattaaaatgaagagagaaacccaatttttgatagctttaatgatgtcttctgacatttaagacaagcagaagtaaactaattttcggagataaggcaggctattaggtgagcttaagggaagtcgagaaaacaaaacaagcatttgtttttggatgtgtatgtggtggggtgaaagggggggggctaggagagctatataatttggcacaagtatgtcatatctaagtgaaatgtaccaaaggtatctttcaactagcaaggaaccagcagaaaatatctaatgatatgttacactgtacatatatccatgtattccacatttagtgctaaaaaatgtggtagttatcaatgcaactaaataggactccctccatcccaaaagaaagacattctagggtgtttagcagagacttaaggtttgaggagaaaagactatactaccccttatataatgatgtgtggttggggatagtatggggagaaatttgaatgagaggtgattgatgggacaagtagtaccctagagtgacaatctttgtgcgacgaattttgaatcctagagtgaaattccttttgggaccgagggagtagcttacagtttccatcatatgaaacgtgtgtgtgagagagagtatgggtctttataaattcttacatttccaacatacacagatcgagcatccacctgctcctttgcctcagctgtagacgcgctaggatctcctcctacaaaacaaaagagtaatagcattagagaagttgcaatggaaacttaccaactagtacctatcagaaaactgaaaatgtgggaaatagaacatcgggtcaaggcacattcagatatagatgtttgaagtgttttatgggtgaattgctgcctcacagcttgctgctgcttagctgctgcagccagcgaacctggtgcaggcagcggggcaagcaggcccataatactaatcatttgaagacaaaaccaaagtaaatcctagggcctgttcattttgatgtcattttcaaccttaccaaattttggtaaaattgtcaaaaaaaaaaaggctacatttagtttgctgccaaaatttggcaactatataagaaatcctaccaaaattttggcatagtttgccaaaattttggtaatgccaaaatttggtaaggttttttttggcatcaaagtgaacaggcccctaatccaaaacctccatgacttgtccagatatatacactcaaatgataatataggggtagactgagatttctagccacatggactaacaagtaaaaatatgtgtatatcccaaaatataagggcacagtcaacaacaaaaatgaagaaatccgaaaccttatattcaagcagattggatcgtggttgaaatgttaagtagcaaaagttaacccaaatatacatatttggaactcggaagtaccaattcctaaatcagactatcagagtagggcacgaattaacggccgatcgatctaacctcaccaagttaacctagtcgaaattgagggaccttaataagttttaaacttgatcagatagtcatctaacctagggtacacgtagatcctcacaatacagatcgaatgaggccgatatgaacatagcagatcgcaacaagaaaaacataaaagcatcagtaaaaattaggcaggcagtgagcacacccggcggaccaccttgcatctccttggcgaccttggcctgcatgtcgcggagggccgcggcctcttcctccatctccttcagccttcgcttcatctggtcgagctcctgcagctgcaacaagccaaatggggtagtagtcagctactcgaagtagggttaggttcatagaccatagatgcgcggatcatggaggtagggagaccttcgcggcgtcgtccccgccggaggccatgtcgacgtccgcgccgtccatgtccccgtcctccgggatctcttgcccgtacacctcgtgctcctcctcgtccatggcgttcgcccctccccaccttcgtcgatccccaatctgactcgggtctctcctttggtgttcgtgacttttggcaagggatcgaatcggaagcgaatgggtgggcccaaaacgggccggttattttactgggactaaagatatcggcccatctgaattgtgcgttccgccggataagggataactgaaggcggcgctcagtcccgcgccttctggaaccttcccgtggaaggggcatacagccttgcagcggcagcttccggaagcttctgaattcttctccaagatttgccgcgacgataaatcctctcgtttctccgctcgctgattcattctcaacgcaaaatccaaaagataagcacagttacgcagcgagagcgagagaggagtggagagccatggcttccatcgtggcatcgaagaggatcccactgttccgcctcgtggagcagctcctcgccgcgtcgccggcccaaggcgccgcctccgctctcaggccggtggccgtcgccggcgggtcccgtgcatacaacaccggcgcgcagctccgccggcacgagagggacgagtcggacgacgacagcggccgtgggtacgacaccaggcgccccacacgcgacgccaccatgcccgccttcttctcaggtagtcgtcatctctcgccgtgtcaagctcatccggagtttgcaccaattgatctcatcaaatcgctgtcctgaacatgttctcgatttcccgatcgatttgcagatgtgttccgtgatccgttcagcgcgccgcagagcctcgggcggctgctgagcctcatggacgacctggcgacgccggccgggcgcgccggcgccgcgacgctgcggcgcgggtggaacgcgaaggagagcgaggaggcgctgcacctgagggtggacatgccgggcctggggaaggagcacgtgaaggtgtgggcggagcagaacagcctcgtgatcaagggcgagggggagaaggaggccggcgaggacgagggcgccgccccggcgaggtacagcggccgcatcgagctcgcgccggaggtgtacaggatggaccagatcaaggcggagatgaagaacggcgtgctcaaggtggtcgtgcccaaggtgaaggaggagcagcgcagggacgtcttccaggtcaacgtcgagtaggagctcaatccgcgcgcgttcggcgtgcgaagttgcaggatgcggatggatcgtctccttttatccaataagaaatgcggcgtgctgtagctttgttttgttttcgaagttatggagataaaagttttggtttacttatgataaaaaaattttacttatgcgattgatctcgtatcgcgagatctctcgcgtcgtggtcaaattcaggcggactccgcgcgaaaacggagcgagcgcgcacgtgaagcggaagaaccgtgcgcgagacaattaaagccaaggcgtccttcattttgctctacatatatccatgaaaaatcaaaacttggcgagaggaatcattttgctgtgcatgataaaattcaaaatttggttagaggaacccgttctgtaattggaatggtgacagaattcataaaaaaaatcaaaaacttggctagaggaatccgttcggtaatatgtatggtgagttggtgacagcagcttcaagctggattgctgaagcttcaagaagctatagctccatttcagtcaacaattttaacttgaaaaattgtttacgaatacttgacattgaacgaaatccaatgcgatatgtttgttgcatccttgaatagttatcatattctaggattgaattgtgaattgttgtcgtgtataggacttatatacaacattaccagaaaccttatcaatattggatgaacctaattttcggcactaccaaatctttgtaagatgaggggaggctaggtggtgtttggtttattaactttccatatattggtacaagttttgtgtgtagaaattaccaaaaagattggtagaatcgtgtctgttcacttgtaaaccactcgattagctatttagaacgcgttctaaggctgaattcatttagtttagttagacattatacatttgtttaaaaaatataatcctaaaggatttacttgaagcttaaagcttaccagttgacaattgctatattttggtaggattccttacgtactaaatgtatataaatatttgataactttatttaaaaattaatatggttaatttagaatgacatcgatttgaacaaccccttaatttctaagttgtcctatgcctggcttgggccatgtatgtggatttcagggagagagaataatcctttaggaatcagatatactccttccaatcccatttactctactactacctgacaacgtacatttcgtattcttacagatattatattcatgtgcaatgtacttcattagtgaaatcattttttctgaatgttttaaatataaaaatagaaacagtggtcaaaatttagacgtgaacaacgtcgcctatgatattaaaaaacagatatgatattttatgacgtaattaggataatataattgttggactatagatcattgcacatacacatcgtagagtaaaggcatggttcaccgactttttcttaacatgtgtttttgcgtgtagtgattacagacccgaacgggttgaaataaaccccatcaaatcaacaataacaactcgaattttgataaattcatagatatcacttaatttcatcgagtttcgtcaggccctagtgatggattgtccacatcttaccaatccaacccaactcaaattttagcactgcagttgccaacgcggtgcgcacccggcctgaagaagcaaaagcataaccgtttgcaacctacagaatatccttagcgggatagtgattagtgaccctttattccatcatgcacttctgcttctgcataccagtagcatacaattgtatatactgcacttctgccctatacactgtatttgtatttgcaatagcaatacattttttttgcgaggaatacaagattcgtttagtagatcgaggtcaagcatccgtaacaccaaggtcagctaccacaccttggcctaacttaacggagatacttttttttcattaaaataacgtttgatggctttctgtaacggtgttccttctctcccttactttttccggtaaaatgttcaaaattaaccgatcatattcatccacaggaggaataacaatactattatccgattttgcgtgcgtattactcccctcggaccgacatttccactttctaacaaacgatctcggttaggcacggcgagcccaccaccatcttcccccttctccttcccctccccgcgtcgcctcgccgtgtgcgtgcgcctccacttctccgagagacaaaccagggcgccgatctcgcagcctccacctcctcacccacgcggcctcgcgcttgcgtgcgacgccggagaagaagcttcggcaccggccccggctccacccgcagctccgccatctcctccggccgcggccccggcggcgaggcgaggcgaggcgaagcggagggcggcgagatgtgggtgttctacctgatatcgctgcccctgacgctgggcatggtcaccgtcacgctccgctacttcgccggcccaggcgtgccgcgctacgtcatcgccaccgtcggctacgcctggttctgctccctctccttcatcatcctcgtccccgccgacatctggacggttagatcacccacccctctggatcgcgttcctcgtccgtgtatggattccccccaacaatttctatgccggtgtggttagatccgctccgggctgagctgattgcatgttttagtactgttgcgaattaggttctatgattcgagcatattagggcatggtgtttggggtgttcgacgagagattttttgttgaatcacgcatttaaattgttggtgttggtcaccggaatgaggtctgatgaataggttcaacctgtcgtctatcagagaggccactagttcattacatagttctaacgaatgcatcataaacgatgaatctgaggcaattcggaactatagagaagtgcatatggctttcctgaccccaattagccttggagaagtttccctgtgcactacttgactaccgacagctagtccttgtcgccattgttatgttgatgacgtcatacaaactcttactagaggaacagtttgcagagagacaagtttacttttgacgtctgtgttttaaaaattaaaacactaataaacgacatatatatcctggcaacaaatatttcagtctctacggggactttatctgatcactaggctagaagatgattttgtgaattcatttggtctgaacttttacataacaacttgcagacattaactggccgtgagaaaggtggcatcggcttcttttggagttggtcgtattggagcacatttatcctaacatggtatgctgtcattaatttatcactatcaagtatcaacatgtcttgcaccatttgttccatggttgtgatgcttctgatcctcacagccatctgcaacagttattgatgtgaatgccattatacaataggttgtttcttagaatgatatgttagcactattaccaaatattcaaaacgcatgattcctttcttttgatatgcttcttatttttctgctgccagagcagtgatttagaatatcattcctttggtatcaatgcaatttgtttgatttttaactaaactaagtccatacttgaaaaattattgagtgtgttgcagttctactgcatggtctgtcaatagaatgcttgaataacccttctttgagtgccttctcctgtgatatattgcctgtttgatatttcatagtacttaagctcatgctgttcctgtacagtggcttatactatttgcagtaggacaatccatggtctttcttggctagtaatttagttatgcattagtttgtgttagcatttctagaattctagactatatagatgctgggtgtactaatattgttctatagcttgcaatggtgtttatatttcagaagagcgtttatgtttattttctctaaacatgcatttgctttatttctctaaacaatatccataacatgtatccctaaacagggctgtagtacctactattcaaggctatgaagatgctggagatttcactgttaaagaaaggctgaagactagtattcatatgaacctgctcttttattctattgtgggggccattggcctctttggactcatattgcttctagtgatgcatagagcatggtacgttctaacctccacttattgtccctgttctatgacccatttgatatataaatttagccttgtaatatcttgaagctatcattagctaccaagaatactactactgttcccaacaaaaacatttgtcttgccctgagtcgttgagattacttcttgagataactgctttcatttaaacttttattctgtaaaacccgatctctttatctgcaacaaaaattttggcagggatggtggtattgtgggctttgcaatggcatgttcaaatacttttgggctggtcactggtgcattccttcttggttttggtttgagtgaaatccctcgaaacatttggaaaaatgcagactggactcaccgacaaaaagtactttctcatagagtagcaaagatggctgtcaagcttgataatgctcatcaagaatattcaaatgcaattgttgtaagtatttttttttaaaaaagaaatagtgatgttgtacttgcagcaattttcttaattgttattctttttacaggttgctcaagccacttctaatcaaatgtcaaagcgtgaccttttgaggccttatatggatattattgacaaaatgttggctcagatggtactaatgcaatcaaaagcactacttaatgttgaacctaaaattttgcaattagatgcaacaatttgtgattctgtccatttcagctgcgggaggatccatcttttaagccttctggtggaagattaggtgaaaatgatatggactatgatacagatgataaaacaatggccacacttcgacgtcaacttaggagggctcacgaggagtactacaggtgtaaaaggtataatttcataaactactggttaactggatgataatagctgccctccacaatttcacatttcttttactaatgtcaagtatgacaaatgcaagttatatggatatttcaaataccataaatcttatttgtttagaatgcacaacattgaagttgtgccattgttgccaacttgccattaactgatagttttatacttcattggtgtgattttacagtgaatatatgacttatgtcatggaagcccttgaactagaagacaccattaaaaattatgaacgacgtgacgcaaatggatggtgagttcatttatatgttactgcactatgctatatgctctaattgaatacttatgtcccatactcccataaactgagcatctacctttaggggtttgcaatgccacaaggatattgcacttgtcaattgtctggtataagtgatgctaagtgatatgccccttgtgccgaagaaggtttagttggttggttaaacaggaaaaggggaaattgtgtacaaacagaaaatttcaattgttctgcaaaggtttggttacattattcttggttattataattgtaatctacactggtattagccaaaaaaaaacttgatttggtgggctcttgttgctgtagatgcttatgtttgtcgacttgactatacaatatgcttcaatgatttgatttaaaaatcttgatttgttttaacaatcaattatatttgtctgatgagagatcagaccacaagcagtatgaccttaatttctttttttcccctaaacaggaaatttgtgtcaagttttagggaaagtcgaccgggcacactgggttcccttttggacacaatgggtatttctttgacctatactaacttttttgcaccggttttgtccttatttatttactagtcaaaatggcttacaatgaattcagagatgcaatgttcttagttagaatatttcattgttcgaagattcttagtaaattcaatttactgcttatggctgataagtaatcgatgggattgactccgtaatacttttttgtgttgccagagttcatttggcgctgtgttctgaggaagcagcttcagaaaggatttgctattgttcttggctgtatgtcagctgctatactgctggctgaagccactctgctgccaagtggtgttgatttgtcccttttctccattcttgtcaagtccgtagggaaacaggaggttttggttcaggtaagaaattgggtgcttcatgtaaattgtcttagcctcacgtccactgtacagggcagttctgttatctagtcctaactttctgtaatgcttactgtagtgtgttactcccatcgtccaaaggtataaggcgtattttgttttgttagggcaaggcaactaacaattgttaatttatgtgagacaaaagcattattataataagtacttttgaatatgaatctaatagtatcaaattttatgccacaaaaattatattctaatgagtaattgttggtcaaatgaaacaaaatacgccttatatttttggatagagggagtacttgtgattacttaggtacttagtatatactacaccaattctgtgtacttctctctattggttacttaaaacactcgtaaatttagtaccaggggaaaaatttgtagtacaaacaaatatagggcctgttcactttgatgccaaaaaaaccttaccaaaatttggcattgccaaaattttggcatagttgtcaaaattttggcaacttactaaaattttgacaggatttcttatatagttaccaaaatttggcagcaaactaaatgtagccactttttggcaacttcaccaaaatttgctaaggttggcccatagtgtcagagacttccacaatctttgtatcaaagcatgctattctatttctccattgtttttatacaggatatatttcccttcgaacaaatgaattgcccctgtcttgtcacacgattgtacaattgctgtatgatatctatattgtctgtgatgattcacaaacttttcatttgtttacaggttgctgcatttgtccctttgatgtatatgtgcatttgcacttactactcactgtttcagattgggatgttaatgttttattctctgactccgagacaaaccagttctgtcagcttgcttatgatctgctcgtaagttttctatgttttccttttcatacttgacttgattcctttaccaaagctgttcactcattctacactttgtaccaaatgctattctgcagaatggttgcaagatatgcacctcctatttcttataacttcctgaatctcattcgacttggtggtgatgccaaaactacttttgagaaggtaaaagttgtgcagttcttctgatattcgtttgctatttaaaggtgttggtagttaacattgaaaaggaaatggtctaccccttttttctttattaccatgatatcttgtacctgataatctttgaatggaccttgtgttgtagagaatgggaaacatcgatgatgccgttcctttctttggaagaggcttcaacaggatatatccattatttatggttgtttatacactattggttgcaagtaatttctttgggcgtttgattaactttttcggaagctggaaaaggttcaaattccagcgtgaggaagaaaatatggatggttttgatccgtctggaatgatcattctgcagaaaggtaacgactgactagatttgtctgggtggattccagccctttctttctctttagatcatatactagcctttgttttgttcttattcttcttactgcttgccccttccgtacacactgggacttttcttatttcttctcaaactaaacacaatgtgtatgtcaccattcagtatacatccttgttcattattgaaattagtggcttatcctatcactatcaccaatctctttgtataaacactgaaaaatctggtgcaagtactccctttggttctctgaaaagcatgttccgctgaagtgatttatgcacttctcccgcagagaggtcttggattgaacaaggatgtaaagtaggcgagcaggttatcccattggcaagaaatttcaataatgtcaacacagatgttgaatctggaaaggtgccattggtgcgtaaggatgcttactctgcattcacaagcttgtgttattctatttttcagcttcctattgtttctggctgaattatcttttgccgtgtcacttactggcatttctcctttccattcttttatctacatgttgtacacaggttgaaaatacactggagatgaaatcaggagctacttcctctagagctgacggaagagtaggtcaatccaaatatgctaacaacagagaaactattgctaccaagtattcagctatcagagaacagagcagacaggcagtgaagccagcaaaaaaggaaatttcttcaacttctgtatctttgcttgaggaagggagttctgaacagtggtccaatactggtgcacccgtgggctcatcagctggaatttcccaaacatgggcaacgatgaagattggttttcagaacttcaaagcaaacatgggttccaaaaaattcattcctttgcgccaagacccaggatttgctccacattcaaatgtctcttcgcccgaatcacttgatgaaatcttccaaaaattaaaacgacgtcctgcagatatgcctgtggattaccttgacgatgatgatgacaatactggtgacatggatcctacattcccaggatcaacaagataggttatgatatattcttttagaagttagaatatgcaagctcagaaattaaaacgatttggtagcattagatgcagaacagaagatacaggatgtatagattagatgatggaggtggccttcttggaagctcaggagtcaggacgcctgcccatctggaaagctgcaaagataaaaggatgacatgatgatgacaggttctgccctacgtgtgcagaaaggacagcagattctccaaacaagagatcatgagattatgggacttttctgctctacacatacagtacattgttaacatgtttttgtaacactttggtaatggagaggatgtagtgagtcgaagctgacgagtgtaaaatgtcttggaaaaaaatcacgaatataatgtattaactgaaaaagaagtacacacaaatgtttttgtgtggtggaaattccatttgtcttgtctactgaaactaaaacgcgtgcatgctgtgttgctgcaatgatcgaaggaatgcatttttactagttcttccctgtttggttctcgtcgcacggcacaggcaagccgtaaaaattgcaccatatactgctgaagtactgatgcgggctgtctgttgattaccaattcttttgtggatctggacagggtgacttgctttatggcttagaataatatatatgattttagctgttgtctgatgtaaatctttgaagaaacgatcatagataagagaaaattgcgcatttactgctattggttggaccacctgaacagtttcatgggatgagtagggaagcaaatccattgcatgatgaaaaatatagcagccattagaagaacacaacaagaaaagccaaaaatattttgttctatatatctgtacggttggattattcttatataaaattatatgatataaataagaaaaataatattctcaagggatgatgacaatgaggaatacacttcagctgatatgctcaaacttttgggaaaaataccagtatatatatatatatatactcctacaatagatgcctatctgaaatcattctcaagaaacatcatttcacactagccggaagatatatctacagtctcattgtttcgtttatgcttattcattacaagtcaaaatttaaatttttaaaacttaatttgaaagtagatcttatggttttcttatcagagtttattttataccatttgttttttaatcactaagaacgcacatataagggtctctttaaatcgcgggaataaaaaaaaaaggaggaatatgaaaaacacataattctgacagaaatataaatataaaatagatgaatacaaaatacagggattaatcaccatttgattagatcatatgaaaaacataggaatcagataaaagagagactcggagaaaattttctaagaggttgatactcttgctaagttttttttttccaaaatctatatacaatcagtcatttcatatggatttcattggatttggaaaactccaatcctttgtataaaagggtcaaataggaaaattttctataggatttgaaccctatgaaattcttacagaaatatttttcaaagggaccctaaaagttttatctatatatttttttggcaataagcggtacggataagcataagcgaaactatgggggcacttatatacatttgaaagttgtaaatcaaacatcaggaaattcagcccctatcgtttacacgtacttataagttgttgtaaaaaaatttaatattatagttgtttttgtagttttttttctttacattgtagcattggattctaaatcgtaaaggatgcatgcatagaaattctacaaattacttttggtatttgcttatcagctatgattaacttcaggtccatgatctataatggtgcaggcgtaacagtcgtatgtataagcaggttaacaaatagccacaatattcagaaacatttttttgctatacacagcagcaagagctaaccaaagaatgtcgatcactgtcattttgcttcaaaccggcctgtacaggatagaccaaaatcaaacaaagaaatgaaccaaaacaaccaaagagaaaaccgcatcaacaaatctacttttccaagttccaaccaaactagaaagccaagaagaatttacagcgacgcacgctgacgatctcatcatcttgacatcatcgcttcgctgcatgcatgcatatgcatttgcacggcctcagaaaaggatccacttggccgccgccgtggtgctcctctcctggtccagcgtcttggagtgcgccatcgagcacccctccttcttgcctccgcctccgcccaccgtcgcgtgcagcagcttcgcccagaagctcctcgcctgccgccgcctctcccgcatccgcctcaccacgctcgccacctcgtcgctgtccagcaacacccgctcgttcctcatcagaagcgacagcctcccgccgccgcggccgccggccgccaccatctcccggtggaaccgcgccgcccacgggctgctggaccctgacgcggccgacgacgaagcgtcgctggacgcctcactcgacgacgagcagcaggacgacgcctcctcctcctcgccgcgcacgacggacggcagcgacgccgacgccgacgccgaggcggacatcaggtgggacaggcgctcccgcaggcagggcgcgcagacccccgcgccgccgccgccgccgccgccgccacgctgccggtgccgccggcacctcgcaccctccgccgccttgttcttcctccccatcgccatgccaagaatcctaggatgccgatcgatttgccgcccgcgcgctcgtctattattatcggctcatccgctcgtgcagcagctaggcgacgtcgctgtgtgggggcgggtgcacatatacgcgggtggttgggctcgcgcgcgcggggagcttcgcggatgttgcacttgcacgcgagttgtggcgggattgcaatgcgatccggggtggtggtgtcgttggactttttcccgcgttgcgctcgcgcctcggctgggctggctgcctggctgcggtcgcggtgccggtgcggtgtggagcgggagctggctgggtccgggttggcggcgtgtgcgtgcgtacgggggcgggctgtttcacgttttcgacgaaaaccgatcgaaaattggtcgattttgggaaggtggattctaaacaatcgagtggatgtccacttattaagtgcatgtcaactaaatgattataaaaaatttttaaaaaaattacaagatagattgatatataatatatcactacacaaacatacaacttaaaatttaacttttataagttgtaacaaaaataacaaatcaaacttacatatttgtggggtgatatattacatataaatctatcttgtcaaattttttgaatttttttcaaacccatttagttgacatgcaacaaatgggtgaatgtccacctaggtgattaaaagtgttttctcgattttgggcttcgggggttttgacatgggacgaaagcagattttgagtgaaattataaatggtttcccaggaattcaaatttaaagcagtaaatttgatcaaaattcaattaaaatgtgttacagtttcgcgaaaaccgtcatcgtgatcggacactcaaccagaaatgtgaactacccttcgtcgtcgcagcagcagtagtactttactagtacggttttgccttgattgttttttttttgaaactattctaattactcgaggggacgttctctcatttgcttaaaaaccatctaaacggttatgaaaaattctaaaaaaatttgacaacattcatataacacatatatacatctccacaaaatcttaagtccaaactcaactcacacgtcgagatataaaaaagacaaattcagcgtatgaataggagcgtactgtttatatctaaatttgtcttttttgtttctcgatgtgtagattaaatttgaacttgaattttggtggactagtaggtatcattatactctacattgtcaatttttttcagaattttacacaactatttgcatcgaatttaaaaggaaagggtatacgaggattagaatccactccctttttttttcgctaacttttctgatcctgttttttttttcttcattttcttttgcaatttatctcgtgttttgttttgtgtaatggggactttttggaagcttccgatcctgaatctgggatgagtgggtgacttttggtgatggatcgataaattccttcggtgccacggcggggaatttcgcttcattctctctttcgttgggttcctttccttttgaggctttgaccttttgtaatgatgtatgggaagtctggtggctgccctgtatttggagttgtttgcgtgctgtcacacctgccggcagctgaaacttctgtgtggatttggtggcggaaacaatatactaatagtagagctctggaggaaaaccatagaaaattaacatgccaagcacatataataaattttaatacagaggagctaagtgacccttctccctgggattaattggtgcaccgtgcaccaccgggcgagcacttcatgtaagatgtagcttaatttcattgtatcttggaggtgtttgatccatggtcacactttgccacatcatgtttttaccaccataatttgttagacatgtgtttggtttactgtcacagttataaattgccacattttatcaatagcatgtctcacacgtcatggactctattttcttaccaattttgccacacttgactccattttcttatcaattttgccacacttagtgactagcaataatgcaccatgtttttatggttgccacaatttgcctaaccttggctatggtaaagtgtggccagcaaccaaacacaccttttgtccgggttccaattattctcactgttataacttaggatatgatatgatatattatagaacaatgaatctgaatatatcatatcatattatatcctagattgatttttttaacattgaatgaatactaaattttaactttaggagttagatatggagtggagttacaaagtaagttaaacacatcttcacatctctaatttattttgttagcgcgctataatctagtcagcttgatttttttttggataaattttaaaccgtttgagtgaattttagcaagaaaaaaaaaaagaagctagagctaaagctagaccactaccaaaacatatcatagtttttggcactctgcagtgagaagcatcaactgatcaacatgctggaaaaatggaaaatcaaagcaaagtgggtgtacatttccaggcgaagttgcaacactcgcaggtggcaaccagctattggaaaaaggaaaaaaaagcaggataggctaaaaagcctggagaaacccatactataaaataaaattcacttttggtggggggaagatacaaacgcaagatggtacgaacgggtcgttgtttacagatcgagccggcatctttacgtcactccaagcacgcaaagccatggactggagaccaaggcgtcggtgaggcgacagcgaaggaggaggaggccgcgaagcagccgcgaaaaacggcgaagaattcttcgatgcgatcgagtctcgtaccccctcgtctcggctgctgtcacgtgaaagagagaggagggaggccctgatgttttctgaagtagagacgtggtcaggctccgggttcaaaggaagcggaagacgaggcccatggtttcgtgctggacggctggaccggtggtctgaattcaaatgacaaaggcggaacaaagtttgtcttgtgctactcgtttcaggaatttgtgatgaaacttcaatgatatctatacaggattttgcgcggacgaggaacgtacgaagccatgctttgctgatttggttggaaatttcttcacagcttgagcatgagcagggcaagttttgcactcggaccacttgtttagcaactcaaaatgtatgctgtctttcaatgtcaacaagattaacctcgaaaaaaaaggggtctgcaggataacctcgaaaaaaatgtctacaggataactggataaggtctaattttattttcaggctgtatgtttctcctgtaaaaatggtcttccctcaaaaaaaagaagatagctcattagtgtatacttatttaaatattagcttaaaaactttggaaaataaatttatatgttttttaaagtatcttttaaaacacactttgtttatagtttgaaaagcgtgctaatgaaaaaagagaatagaggttgaaaagatggagtacgaaacacaccttaacctactaccatgccacaggcccataacagttcgaaggactccaacattagcaggattctaggtagaattgtttttaaagtagtatcgaattgtaggattgtatcatgttagcgggatattataatattttcttttttaagtttaatttaatatttatattaattatgtatagtctataaaaaatagagtaataataatatataacataaagagatagatttatccagagaaaatcacctattagtgccattagttttatttgacattgattttaaagatacatgaaagaaatacattcagaagttaggatccagagtgaaaagttttggcgtgttacattggatatacggacacacatttgaagtattaaacgcatattaataacaaaacaaattaaagatttcgcctgtaaattgcgagacaaatttattaagcctaattaatccgtcattagcaaatgtttactgtaacaccatattgtcagatcatttggagcaattaggcttaaaagattcgtctcgcaatttacacgtaatttgtgtaattagtttttttcctatatttaatactccatgcatatgtataaatattcgacgtgaatgggtgaaaattttaacaggggatctaaacatgccttcaatatcctggtccttacgtgactctaacgattctatgttctgtaccccgatacaagcacgataccatctgaaaatgaatcctggaagcggtatgtaccatttcgtccgcatggtatcctagctagcaccatacggcactacgatacgtgtgccgattagggatgaaaacggatcgaaaacggacggaaactagttttatcatattcgttttcatttttttttcggaatcgaaaactcggatacggaaataaaatcgaatattatcgaatacagatacggagcgaatacgagacggaacgaatacggtagcgaatatttaccggtatataaaaaacctctcaaattgagtttcttgataaaggaagagatatcgcttattattttagttcaacatctccaacatttatatcgtcaattttgtagacggttccacaactgtatgtaaaaaatcgattttcatggctgtccctctaagagatccatatgcaaatatgattatcattttctattcccaagaccttttactagatgtataacttacttaccattgtataaattggagatgttatttattttacttcgcatcttcgaaacttgtaatgtttgtattatactttaaatgatttcaaatacaaatgttataaactacaaagtggtagatcccgttgagctctacaattttgatatggaacacatccccatcagatgtcgtttgaattgtagatatgagattttgtaaaaattaatatggtatattataatgaatatttagacccttaaatgacctcaaataataaaatagtcaataataaagttgtagatctcatcgagctttacaatgttgatataaaatttgtcttcatctgattccgtatgaaaaagttatgcatatatacgtgtttttttctaaaatttgctcaatatcagtggatatctgaaaaaaattatggatagtttccgaccgttttccgattccgacggatagtactcttacttcttactgtattcgttttcatttctgagaaaaaaatatccgaattcatttctgaatcctagaatttcaggataattccaaccgaaactggtactgataatcttggagagaactgatgaactgattcgagctcagcggggttcgcgcaaagagagagcccatgagcgctcgtaccgacgtacggtacggcaatcccgcgcgcacgacgctggcgctctgcggtagtactctctccctcaataaaataaatacatacagttttacactatttatgatcaatgtcttatttaaaatttttttatgattataatttctattgctattagatgataaaatatgaatagtattttatgtgtgactaaatatttttaaattttttataaattttttaaataagacatatggttaaatgttagacatagatatttacggctgcacttattttaggagggagacagtagttggtagtgccaagttgctcgcacatgcctctcgttcggtcgtgagcagggcgtgatcggcagcaacaagtggctgtttttttaatgattctttccgagctttgctcgctgacacgccacgccgcgtcggtgcaggcgtggcggtgcgttctggttaatttggcacagctggaaccacgtatgctcgatcgccgacgattacaagtaacaccacagtgggttcgtgatgccgtgagcgcaccgtcgccctcgcaccgccatctcagggaagcttccgtgttttacacttcgcagcgtgttcgaatacacccgtgttacgcggagcccaggccagccacgcgctgctacgtgccccgtgcttcgttggagtttgttcaggtttgtgagttacgttgcgtgcagcgtgcagagtgccggggtggagttgcgaacttccaagatgacgcggcacagcggacctggcccgtgttactcagtaagctaggggcaataagttcaatttagatctgttaagttatcgccgagtctgaaaatagtccctgacccacaataccacatctcagaggtagataaggtgatatatgggttccactatttttatattcttgtttaactgacatataggtctttcatattttgttttatttttttattattttaattttgctccctttatttgctttttctggatcaatctgtcatgtaagcgtcacgttaatgttgcgtaggatgaaaatctagtcaaaggaatcacgtaggcatcttgtcaactaaaaccaaaaacaatactgctaagagacctcgtttgcactagttattttgttttgtaagttggaaatgtattgtatcaggttttacaggttttgcggtacaacgaatttaagactacatgaaagctgggctacataaagctggcgtgtcgaaagggatgtgtggtcaagagagcccaagtttgctcggcccagattataagatgggctggtccgtactgggagtagtaatcttgctttactccaactcacgcaaacatctggtcattttggagtatatgttcttccagtcatttgtgttgtgaaacaaatttcttggagataagtttcttgtgggccaatccgaaccggagtagagataagatctatctcctcctaagacccttatatatacaggggcagggtgtgacatctaatggctaatggttggtttgtactctagatgagatctataatgaagagagagctccaccctatatctgtgttcattgtctacttctgcaatgttcttgagggcaaagggatgggtgcgggtgttctacatcatctcacgcctctactgctgtgggagggacagggaacggatccggtgatccgctaataggcgcgttggtttacaacacgttatcagcagctctccgttcaccggtttgtcgttccaatctgttatttttgttagattaatttctagctacagattgatctattgtttgtcctggttttgttttgcgagatagcgtagctacctgctcgcggtgtaccaggacgacgcggcatagcagatgccgctgaccttgattattggttgttgctagtctccaggccgccgcacgtccggaagcagtatacgctgggacgtgcatgcaggcgcatgcgaccgaccgagccgccagcgcacgacctcggcgatgtcgcttggtgcgatcgatccggggccgtccatcttgatcgcttgcaaggcatatgcatctaattaatttccttgttgctaattagattggattgctgtctgttttgcatgtactgcattggtcgcatatggactcgttgggcgtcaccacgccggagagatgtcgtccatgtcgcgcggcgtccggccacgccatccctcgcccgtgcgcgcaggccaccgcatgtgaagggatcggagctgcgcaccgtctgccacgaggttgacccctcgggtgggctcctgccccttgcgcagcccacactgctctccgcgcggctgcgcgagtgcaagacgagatgcacgcagcgccgcatcggccggaccagctcgatggctggcgtggatgcggcaaacaggatgcccaaccactggagaaagcaaactagtgcatgcatcgatcgatctgatgacatgtgctaatgaggtaattagtaagattagtttgtacactaatttactaatctatagatgcatccgggcatgtgtctattaaggtatgaaatctatatgtttttatagattgattatattttctcatttttatcatattatggatgctttgcttgtagacgtgcctgattcggctaggccgaatcggccgactcgcccaccctccctcgcatctctctgtttctctctttctctgatgacgccacgctgggaatgcggtgacatattctcaatctatgtagtcggacttagagacatgttggccatcgttcgtcgtcgctgttgggtatgccgtcggccttgcgtcgatgccgtcgcgggaaaccgccgtctcagaaaaagccctaaacccatgttgccgttgccgccggagttaatgccaaagcgaggcgccgccgccgttgacctcccatcgacgctgccgtcgagccgtggtgggaggatgatgggtcgtcggctgtctgctatcggattaacctccgccgagacgatatggccggatgcaatttggttgccattgttggggtctcagttgccgtcgttgagttcgcctcgctgtcgtcatgaggatgcgcgggtcgacgcggagctccgtcgtgtgccaccgagccaccaccgcaccaaattgccacataggagtgatgtcgtcgccgccgtcctgccaatcggggtagtggatgggtcgtcgatgacctcctcgccgtgcaccgccctaaatcccttcaaagttgacagtcgacggcctccaacgtcgccgccgtgcccgaggggccggtgcgccggacggtggacgccgttgcggacaatgaatgggaaaggggaaaccctaattccccccttccctctctcggtcacttaggcataccggcttggccggtctgcctccgcccgaccgaataaagcccaacagtaacgagatagcccaaacaaattaataaaaataataaacctggaaatcctcatgggcctagagtttcggaaattcggcccattaggcattttgggctacactatacttgctagcccaaataagatcgtggcctgaacggtaattcggcccgattaatttcggtttattgacaacttgcgtttaagcccccggagtgttgggtttttatgctatagttcactgtttaatgcaattttacagtttgaaccttgtaattaacaagagattatattaattttgtttgtgtggctatgtcttgttgcttaggccttgtatagtttggttttgcatgtgggtctccagactcgtaaataaccatgtaatggtgttttttaagcattgctttgcttttaaaattgatgcaattccaactaaataatctagagatggttttctaggttatgatgcttccataaattgtgttcatacagtgtagaatccccccttggaagcattatgatgggtttattttcctgcatttatgtgtgatggttttctgtgtggcataaatattgggaatataatgccaaataagaccaagtaaataacagaaaatcacctaatgcatggaaattttgggaaattaaatatccatggctatggataagaccactctttactgatacactcctccatacataaatggtgatatcgatgtgtctacaagatggagtcacgtatacttgttgtacgagatccatgcttttgccgtattcactgcgcatatcgtctgtttgcgtgttgcgttctctgagaaccgcatgaaacgattcggatgatagtatgggtgatttcacgtaaaggccttcaatgactattgtatggctttgggcattaatgtagaccactctatccctatgatcacactcaagaatgggattctgagtcgttgaaatgtgtggaattagacaatgtgtttgggatttattgtgcctttcccctagtggcttaacatctcaatcagagtatggtcggactacggtcgacattttttttgctttcccaatggttgagagcatgcttttctgatttggagataaatgattatacctcaattttctagcaacgtggagttgcgaggttcaataatttgagatatttttcacctggcccggtgaaagatgtagagtgttttccatgtggtggaatgacactgttcgtatggttgcccttggagtgcacatatcttctcaatattatttggaacctgatgtcttgcaaggacaccggaaaagaggaggcaaatctagaggaataagcccaagggtagatgctgtgaataggcatgattcccacttcactatagcgccaacagcttgacttgggtgttgacccagtctcggtcatcgtgtggatctagcgctaaatggccacctttggttgttgaccaattgttggtagtgtttgtctaataaagtcgttttgacaatgggagttgtatggctagtttagagcatgtcctaggaggacattggtcgactatactgttgccaagcagtttatctttttcttagtttggaactttgcattagatcgatatttctcagataaataacgttcttggtctttcctgttttattctaaagcttatcttcatgctggaattgataaaatgctttagtttagaagaacaattagtgtatgatccgatgagttacaaccactcacacagttcgacgtaactgtatttcagacaaaggttggctatgcactattgcgttttatcgcgctctcgtagtcgatgactactccctggttgtgttggttgatcacccacgggttgatgaccatgcttgtcgcacactggcgtttttcgcgtgtggacatgtgcaagccatgcaaaggttcgtcgtgttgcatgcgttgagcgcgttatgccaacgacggttgcaccgacacattccactatttttgtggatatgtctaaatataatggttttattgtgaatattaccattattggaggtattgattatctctcgatggctatgtccaggggacagtagcaaatgtggttagataattcgcttgtggatcgtacctaaaacatgctgcttaactatgacccaattctagggtttggtatgagtaattggggtcaaacttgggcattaaacgagatggactttaaaacaactctgcaccacaaaaatctgcttggcagcgcaggctagtggccgcgcattttgctatcatactccttgttgagcgcatcggaatgcgttttgccaccataggttgccttcttaagcatatgacatgcgatgtctattgcacgtcgatccggaatcgattgtgagtttgaatggcactaggtgagcattaatccatggagagtgcatttggctaaagtatttgcatgttggttgcatatacatttggtagcaatggtggtttttgcagacttgtatatcctaagaggttgaggataacccttcggaagaaggaagaatacagtattcatgccactgtattggtatatgtccaggctcactgcatataatggaaaaatctctcctattaaagtgcgtaaatatttcccaaatatatcaccaccgtagcatacattcgtgggagaacatttgtgatcgaggtgaaattccttaatcctatgccacgatatggggattggtagtatgctattgcaagacatctcggcattagggggagagaaatgcccattttggaatgcctggagaattctttgagtgaacgcactaaatgagctgaacttgtatgtttagttcatactcctggttgcttggtgcacggagtttttgccaacaaaatcgtatgaggaacaactggatagttgttaaaaagagtaatgctcccaattgtggtaaatgtggatagacctgggaataatatcgtatccacataatacttatggcatttgatcatgttgtgcggggacgcctgctaacacgatccgtaggccttagtcagagcataagagttctcactggatgtgagcatactcctttgattctcttggtggagaattcacctttggaaggtgatatacctcataatgatgttcgtcgtggagacgacattcctagcaatgcgcgcatattatggtgctaggaatacggaacaaccatggatcgatcgttttgggaaataacgaagatctggttaaatgtgtaagtgggaataaatgtatcgacactatgtcacctcttgctaatgattctctgtgagagaacccgaatccggaaaaagtccatggcatgagcatgcgatgctcaaatcgggtcaaatggaaatgcaattgaggctgaaccgaatcgctaagtaaaagtcgcgaatgttgttcggatttttacaggtcattattgagataatgaggtggtgatgtgcgatggttcaagtaggtccttgacgtgacctctcccacatgagttgaatgttccgctaaataaaggtattggcaaaatagcatgaaattaaatatgcagttaacagatttaggaaatccgtgaggtcttgaatagactcggtagtgaagttgcagcatgcaaatctcgtaccaataggtattccggtaagagtacaatctcccgttgggagaaaatctcattgacggaattttctctgagggggagacctcattgatgaattttcctctgagatacaaaataattagtaagtctgaacacaccatattgtataatcccttagagggatgatgacccatttatgacccggtaagattgaaatgaggaacctgatgagatcatagacaaggtctgtaggcacatgtgcatctcacgattatcactggagtgtgtacactcgtaaaatccgttccaccttatggttggaatggtggtgtcctctaatacctgccaaggtatacttggtgttgttggctgtgtgttatcccccacagtgcttaaattttcagactagctagttactctgatcgttacaacatgtctttggaaggcttgtggttgatcttgtggatccctaattgttgttgacacagtcagagaaagttgcaatgatcaggccaagtgcttgatggggtcacgaccaggaggtgcgtgccgttgcgacttatttatccccataatccttctgaaggatgaaatagattgtgttgtacaacagtatgatattgtggtatatgatagtgatggaatgcattactctctatgttccctactctcgttttagcggtgaaatgagacaagtcttttaagactaatggtttgacgatctgaaggattcttgcctacgcatacatctgagagatgtttaatgctatgggaacatagtctgtgacaaaggttgtcatcaggggaagtatgtgctatgtgttgattgtcatttgcgagacatcgaaatgtcttagagtatgcccagggcattgactcgatgacgatcacttagacctgttcctgaggtcctatcataatcagatctgtctttattgaccgacaccaaatataagtgggctgcctcatagactcctgaggggaggggaggtgagcagcaattcaagttgagtgataatctagaggattgatcacctagtctctcccagcttttagttctcggaagattttccggagaattgggatgagaagactttgatgtttgctaggttcagggggagagcaccctagaacatgacccacaagatggaccgtgtagtccttagtgttgtactctttttcccttgagtgagtggagctggtgtttgtaacgccccgattttcgttcgggtttaaaaatcattaaataatgcattttctagaaattaaataaaagttaaatcaatttaatcaagtgaaataatgggagaattaaaattttcccttaaaaatcattggccgggaatattttgcaatattctttgtgccctaaaatactctccggaattttccgtgaattttcggagctcaagaaataattttaataacacaaagatcattgcatcaattaaaataaaaagaaaacaaataaaatttcccccttcctctctttgggccattttcggcccaagtcttctttcctctcccgcggcccgcgcgccttctccctctctcgggccggctcccctctcacttggcccgctcgcaaaagtctgttttgcatccctccttctctcccttcgccgacaggtgggaccggcggtcccacccgtcagctcctcctcctacctctcgccggccgaccccaaccgccatagccgtccacgtcgccgcaaaatccggcgccctcccgcacccgagctcgcatccaacgacgtgggcacgatcccctccacgtcctccaccatttcccccactctccccgcgaaaatcggcgccggttaacccctccaccaccccacgtcggcgccccacttcgccggccgattccgccacgtccggcctcgatcccgccttcccgagcccataaaaagcatccccgtgctcccctcgtccgtttccccatttttcccgagcccggcatactctccctcgctctccccacgccgcacccacgcgctgccacactccggcgagctccggtcgccgtttcccgccgccacagccgtcgccgcgccgagccaccgccaccgccagcttcgccaccgcaaggggaagtccggccgcctcttatttccccctctccacccctcgagcaccactcccaccgcacacccgaggccgccgcccctttcaccgcctccagccgcgtcgcgccgccgcttcggtcgacgtcgactcgcgccgttgcctccctcagctccgcaaggacgaggaggacctcggccgccgcccctcttcgccggaaatccgccggagctcctccttcctcggtcgccggtgagctctacctcttgtcatcgccatcggtcttcgtttccagtcaccccgcatcggtcctcccctccctaactccctcttctccttctgaaggtcaagggcgaccccgtccgccctccgtcctcgcaagtcgccattgggcaatcgtcgtcgccgtcctcttcctccgcgtcggccgccgcttccggtgaggatctctcctcccttccttttttcccgtcccctttcttgccgaccgccgcctcttggggtgcgtcgccgtccccgtgcgcgccgctgtcctccggccacccgccgccgttccacgtcgccggctggtgcagccggttgccgcctcccccttgccgcctcccccttgccgcgccgcgtcgccactttctctcgtgcgccgccgccgcgccatggctcagccaagccggccttgtgccgtgctgtgcccctggccgccgctcccctcggccgcccgatcggctcgggccgatctgggccgtccacgtggtggacgcgcccccgaggccacgtgtggacttggtccaccgtgcgccgcccctttgtgccgctgacgtgcggggcccgcgtgtcggcgctggtcttcccttgatgacgtcagcagcatcctttttcctttgtaaaaataaataataattgcgcaataaatcgagtttaattatagaaattcattaaaatggctcaaaaccttctaaaattcatatctaattcattcgaactccaaattgagccgttcaacttgcaaaattcatctaaaattgagctctacatgtttgtttactttttatgtactgtttccttggtttttattagagttttttctcgttttgcgtgccagcgtgtagtttccgtcgtttcggaagtccgcggtcgcgaggaaaagagttcggaagatcaaagtgaagaagcaaggcaagtcacacattccccttgagcatgttgatcccaatttacaaatgttttactgtttgcaaacaaatatgcatgttttgctaattacatggggtcagggttttacctatctgctcgcttgtgccatgtttacttgatatctgttctttgtcaaccttgggtaatgaatcgactagctcatgttacttatgtgacctagctagaactatatgcttagccatgcttaattaccactagctcagttgatgggataactgcagtattagacctttttagtatcagagtgagctgcgtgctcgagacacctggccatgcttcatggtcgtaattatccaactaaaatgcgactgaatggtgggctgtgggtgcatggttttgctggtcgcacccatggcagttaaggaccggttcgcgggatgccctggaagaacttatcgtacttaccacaagccagcgtgggcaacggctgggcttgtagtgtagcttttctctagccgacgtacccaggcgagggtgggcgtgatggagttgggtcggccggggtgtccggttgatcggcttccggattcaccgcggcacgaaaggggggctgcccgttgcctgctggggacgggggtgaaccctaaggtgtggtgcgatcggttagagggggttatgcgaagggtcctgtcacggcctctttccggtatgtcgtggtggcatgtcggcgcacgggaacgtgtcgtggggctgtgtcttgtgggtacagttgtacacctctgatcagagtaaaactattcgaatagccgtgcccgcggttatgggcggtcgaccagattcaccgtgattagtctcacacttaataaatcgacctaatacactgtagtttaggtgggttggttgggcctgttcaacgtggtgtagcgttgatcagtggagatttaatgttactttaattactcaacagttttactgttttgctcaataaaatgttttacaaccgcctttatgcaaatagccacaaaccgtccttgtgttccccttgcacgtctgcatcgttggtgtggcttgctgagtacggtggttgtactcagtcttgctattattcccccttttcagaagtgtagtgcttctgagctgaagacgaagttagaggaccaaggctcagaccccagttgagttttgcctgtggagtggagctgaagccccgctaggatcgcctttttccgctgctgctgttttcgtttcggtgcgaggactaagtgcctcttttgtaagtattttacgctttatttacgtttggaactgtatattacttgtcgttttgtgtaccctggctggtcctggacagggatttaatacacaaaatagtctggaaatttgggctaaatttctgggcgtgacagtgttcctcacataaggtttttaacgagacaacaacgtgcaatgcatgagcgataactatgtactctttctcctagcctttttcccactgggttttggtaagagttttgacgaggcatgagctggtcgcggattagcccaagggggagtgttgtgaaacaaatctcttggagataagtttcttgtgggccaatccgaaccggagtagagataagatctatctcctcctaagacccctatatatacaggggcagggtgtgacatctaatggctaatggttggcttgtactccagatgagatctataatgaagagagagctaagggatgggcgcgagtgttctacatcatctcacgcctctactgctgtgggagggacagggaacggatccggtgatccgctaataggcgcgttggtttacaacaatttgatcgggagtgtttgagaggagaggaaaagagatgagctattagcgcataattaattgagtattaactattttaaatttttaaaatagattaatatgattttttaaagcaactttcctatagaaaatttttttgctaaaaacacatcgtttagtagtttgaaaaacgtgcgcgtggaaaacgagtcacaatctcccctatctctcacgaaagaacgcagtcgaagcaaaaactaattaaatggaccattgcgcacaaactaggattgggaactccactgaggttgcattcggtacctcacgcacgtaaaacagaacaagtcaatagcgcatgactaattaagttttagctaaaaacactttaaaatgaattaatatatttttaaacaactttgctatagaaatagttttataacaaaaaatgcatcatttagagatttgggaagcaagcgcgtgaaaaacgagagagtataagttgagaaagtggagaaaagaacgcaacctaacataggtaatgctatttttctcttctttcattaagccaaatcaccttgattatttctatcccttagataattgatctatggtctaaattatatttcttcctttattctattacgaagtcatatcaccttagtctttacgtgattaatctatattatctatcttctttttcttctcttatcgaaccacatcacctcaattttgcttttgaataattaatctatatataatttaaattgttataaccaaatcatatcgattgtttgtagctttttctcaatagtcgataaaatacaaattatgcaaagtatttatgttatttttactgttatcacacaaaactcccacggtaactggtaacatctattttaaaatatagtcatggacaaaaagtctgtgatgtattgggagccaaactagactaatggttagtcttctaatcataaacgggccgtttaaatacacatgggcttctacaaagtccactggatctcatcaactcaagtgccagaaacactatcaacgaatcgtgtgcgttggtattagtagtacaatccaattcgcatattactatcacatgaacatgataaaaacacaaggaatttaatttcctttccccaagataacgcaatccaaaagtataaaaaggaacaattttgagcggttgccatgactggaatggcctcatcttttcgcttatgcttatacttatcagtcaaaatttaaatttttcaacataaaatttagagttgattttgaggttttttcatcgtagtttattttttaacccttgcttttagataattgagaacacgcttataaaaattttataagccacacgatggggctgaaaaatagggtaacttgagatgtagcaattcagctccacagctacaacaatgaatacaatgaacacattacatttagcattgcagtacacgacgcgacctttgtacgtacatctaaatactacatatacgatcactttgcactgcctccatcctggctactactctacaacagtccaagctgcacgaatacgacgaagcaaaccattccgatggtagccagcgccaccggtccgagcccgccggcgccattgtatgacatgaacgggacggtgcccggcgtcaccggggttaccggcgtggcgccggcgccgccagagcacgccggagacgtcggagtcgtgtacggcgtggtgggcgtcgtcattggggtcgaaggatacggcgtggttggcatcggggttgacggatacggcgtggtcggcgtcggggtcgacggattcggcgtggtcggtgttggcgacgatggcgaggagggggtggagccaccgccacctccacctccgccgccgccgctggaggaggaggaggagccggagacgtccacctccatcttcatgccgccggcgcagtggccggcgatggtgcagatgaagtagtgcttgccgggcgtcttgagggcgacggtggtcgagccgctgctgtcggagccgagcgcgttggccgccgcgcacgccaggtaccccgccgcgctcacctccaccaccgtgtgcgctccgctcgcgtacttgaacactacacagtaaatcaaaccaccaaacactcgtaactccaactcgtcaagtcaagcaacgaaaaaaaatcaaatccatgtccatggcagcatggtcatgcactcgcatgcacttaccgaggctgtctccgactttgaacgacttggagccggcccagctggtgtaatcaacgccgatcgtccacccggacgcgtcgccgacggtgtagctggtggcggcggcggaggaggcgcacgccgctagcagcagcgccgcaattgtcaggcaggaagcgccgcaagaagccattgcgatggagtcactgatcagataatctgggaaataaggttggcagcgcgtacgtgtttacacttgagatgattcttggagagttgcaaccatgagaagacgagacgcgacggaaagcatgtcccttatatatagcagcattgatcgattgcaacaacggggaggtttggtggccgagtggttgtcaccgaacgtgtgggaaagaatatatcgagctcgctttaccgatgaggaaatggaacgcctttggatgaacagagccaaagctctggttgttctgtgcatgccaacaaccaataaaatcatcatgatttaagtctcaagaaaagttccttttttttcccatcgtgatgatatcgatcctgtgcagttttctcagtttgctgattttggctggtcgatattatcacccatgtgtcactgattaaatgaccagacaaaatctaattccactatagactacacatcttttcatttacaaatggtcaattgtcaaattattcgaaaacgtacactggaagcagagaaaaagggtggctcacatcaaaattctcctttctctcggatgcccaactgagagatacgcatcaaaggagcattatagcttcgagcctaaactgttcttttaggtgcaatatcttttcatttgataattcaacaaagcggcgcggcgaaaaataattcagcaaagtggagtgtaccgtccggattgtatctagctcagcgggcctccggtgtggcatctgatttacctcttcacatggagatcaactgggccaagctacgcaccaactattttgataatgacttcacacttgctgtttatcaaacgagttttaggacggtaagattgattttccctgtgcatgagatgcagatgatttgcgtcggtgttatccagtggtcagacatcaatatgctgttgccactagttaatttataagacaaaagcgtgacatgaacactgcatatatattctgggtgaaggactggacagtagaggattagacccctgattattattatttttgacagtagacccctgattaattagaaggcaaaatggaagcatctgctttgtttccggggtcggattgagattgagacgctattcaagactccagatgtcagaagatggtcgctcgcctaccaaccgatccaagaatgttcctactgctctgagcgccctctgaaagtctgaaagaacaaattacgggcgatgtttttcagacagtaaggcactctcctcctacgagactgaaatgctccttttgcagttcagacttcagatcaacaacaatggaacgcgaccctgtgcgtggcccatccttccatgctcatgctcccggtcagttccaaagtgtgaaggcatcaggtgtcatggtccgcgttaggtgggaatgccgtttctattctgaattctgcatgctcgtatggtagtaggagatgttgtgacttgtgatgttcctgttctgtgaatgccgtttctgttctgaattctgtagctcaattgtacacccacaaggccagggaataagttcactccattccctcaatttgtagcccagtatgattttcatcctcaatccagaaaacatatccctcaacttacaaaaccaaatcgtgcataagaggtccctcggtagtattgtggccggttttggatgacgcggcgcatacgtggctccctttgactagatcctcatctcacgtggcattgacgtggcgttttgatcagaaaaaaataaaggaacaaaattgaaaacaaaaaaaattaaacgaaatatgcgggacccacctatcagtcaaataaaaaaacccaccttttccaccccatctcttcaccgcggatgacagagggagaggaagggaggccgaccgcgcggtgctcctctcgtccgccggccgtctctcctatctcccgccgtcgtgcaccgctcctctcgctgcggccaccgcccctggtgcccgccgtcgctcggcccaccgccccaccgacgctccacttccacctgccaccccactgctccacccaccgccccgccgacgcttcgcttccacccgccgctcctcttctccgcccggcgctcgctccgcccaccgcccgccacccctccgttctctgccacccgttgtcgctccgcccaccgctctgcgccgcccgccgccgcttgcccttttgcagtgtaggagagagaaagagagggggtggagggaagagggaggatgacatgtgggaccacatgggcccgccttttttttattttcgtgtgtagctgacatgtgggtcccatagtttttattattttttgggcatccaattgatacgttagcgctacgtcaataccacgtgggatgaggacctagtcaaagggaaccacgtgtgtgccacatcatctaaaaccggccacaatactgccaagggacctcttatgcatggttttataagttgagggatgtgttttatccggttttctggactgaggatgaaaatcagactaggcgacaaattgagggatctagagtaaacttattcccaaggccagaacatactaaaattggtactagcaatcagacccaagcattctgtgggccatattaggctaaaaattggaaaattcatttggagtcccttaattattggccgagtccgattatcattcttacatgcaaaactggatatcgtgtctccctcaactctttgtaggtggttttatctgatatggggtctatatggcctgttgatccggtcttcattcgtcatggtgcctacgtgatggttatgtgtcattacggttattttttaaaaaataaactgcccgcagtgacgacgtgaggaaatgatccgtaaactgtgcaaagcatcaggcgccaatacacgatcaactcacggccgggccaacccagattttcctctccgtactccaacccaactgttattcaaggattcggttggatcgatcaaaattcagtgccgccgcatcgacactgtaaataataaatgaacaactgttgctcgcgtccctttaacgagctgaattcgctctcactttgccctgtgttctaccactgttgcatcaagagcctgccaatcggggggtacaacagaatgtgacaacaaatattctctcgaccactttgcagagccttggaggagagccggcaagggcctgaatggtccattgtacctaaccactggtctactataatactgttccttcttgtacagcatacaagtaccaacttgcagtaattcaggcctgacctttttcagtctcactagcgttttgtttctcagcggagtgggttttttttttttcgcttacataatgggatgggagatacaggaatcaatggaagggggctcaccacgatagctctatatctggcaacacctttaaccagtcattattccacagcagatggcctgtttttctcttcttgtcgatacatgcatcaggtgatggatcactagacttgcagagttgaagggcaagaacaccgggtatttgcatttcctggtccagaagggatcccatggtaggtgtgatgtatctgttatttcatctgcatacggcgattggtgaccggcgagcccttcctgaaatgtgtttggtggtttggtttgtccctgcacacatagaactgctcatttttatttttattttttactttcagaatacacatgaaatttgggatcaagggttggacgtttaaactttaaattttaaatttaaaacttaatttttgaagtcaattttaggatatttttaacgttttttctttttagtattaatttttaagtcgctaaggacaaaatttactcacaaattattttttatcgctaataagttattttgacatatgactagctagctgttggctaatcaatggggatttaagaatatgtttaatcataagtttttaagtaaatcaagccagcgcgctgattgcatctcatttcagttcagatctcctgagacatctgctgatgatcgagtgaagatggacagtgtagcatgaatccaagatagtatgtctgacggatcaagttgtccaagttatgcttagcgtatgatactctcattctttgattgtttaagcacaataattaaggcacacgttatctaacagataagcttaattatccaatgatcgtcaactaagtatggcactatggttgtgaatttttcatacgggtatttccaaccaagatctggtgccggagatctttctgatggtagagtcattggcatgttcctccattggaaatgcagtggaccacttaagaattcctgatctctttcagacatcaatcacattgttatattctggagacctaacctgatgttacagagttggcaaatgggttcgctagacccagattttgtgcagccgcatgtgctcagtcctcgtagccctttttgtaagaaccctaacgccaaatagctcgctactggctatggtacgtatgatgcactggcttactcatttgctctaagacaagatccaaaagtacagtggctttgtctttctcttcaactttttgcaggatgatctatttagttagcaccgcggcctagaaatcatgttaagggatgattccttgtcccattgagaatagcaagactttcagtaccatcctatttttctccatgattaggcagctgtgagtaacaactttctgaatgttcagtttctttttcctgaaggtgatgaatgttgatttttgataattgaaaaatggaaaatgccttgattgtgatctattgaaaaatagcaaatgcctaattttagcgtccttgagaccctctgtcatcttataagactgttagccagcccagctaccttctgacattttatgattctctatcaaactacagctatatgaacacacttgctgttattatgaagttcgaaactttcttggaggagtgaactgaagaaagatgaattacctctgcctctagatactccaaatcgattcctctattgtcacctaattgtactgtatccagttttgtttgagacggcactgaagaactgaagcagatacttactcaaatcactaaacaacaaataaaaatcttacagaaaagggacaatacacttcttgaaggaaattaaagctctttcttctatcgtttctgcacacctttctttcagagctggactgcagattgaattgaaggagcaagctagtaggccgcaaaaagacactacagttcagaaagcagcaaaatacccactgccaaggcatatgcagatgcagtattgcagatttgcaggcatgtgggtaacattcttttcagttacagttcagtaagcttagtacggttgcttattcgtttttccgcggactgacggtgcattacaaaaactcagaattgatttcaaccatctctcacatatagcctagaaaatttaagcaaattgatggacccccacatgttagtgatagcttggaatgattccgaaaataaagctatccgtacatgcagtggctttcattttttttgagtcgttttcaatctttcagaaacttcacaaccaggcttgccattttactctctaaaaagaagaggattcctgttcattagcattgttcaactcaattgcaataattcctatgggatatactcctaaaatccaatccgcaaccatggcccccattttaatcattcgaatcctagaaagagactttgtggatgaaagtccaaaaatcctacgaaaacttttgccctgatcagtagcagcagcatgatgtaggaaaggccactacggctggttcagtcacaatgactccgacgtctgttacccgagaggctcttttcatcttcagactccgacatctgaagccatcaaggtacatacgtgatcgccagggtgatagcaatgtaaaagatgattgaagcgcgtcatagtacattacttcctacctgatgaactgtgattcatggactaaaaccgtccagtttcgtttagaaatgattagaaaaaatgaaagaaaattagccaccacgagttgatcacccgtaggcacacgcaggtgctaaataattggtgctgcgagatgtgactcgacgagctggatgcttacatatgtactttgaaaattcagttaagcagatctgatccgctgattgatacatgtttaattacttgcacgcaaacatggcgggcagctagtattgtactaccctgacaatggctcaaatcgcctgaattatccatgtactaggacgggattaattgctacaaacacatacacgcacaaaaacacctctttttttttcaagctaattaactaactaatgcactcgccagcgatcttcgtgaccatctgattgacggcgccggcgatctcgtcgactgacgaaagccggcattcatcctccatctgcaacacaaaatgatgaatcaatcaaatcaaattaatctgcgcgtagggagtcagaaccgggttagccatgcgttagcgaataaagcacggtcggagaatgtttctgatttctggttggaagggtcttgtaactttatatcacagataatctgtgatgacgctaaatttgagtaatagatttacccttccccgcaaaaaaaaattaatctgtcactgtaggtctgtagcgcgcgaaagaacggcttgatttggcatgcaaaccttgaggctgaaggagtagagcgccaaatggtcggcggtggtggtgacgttgaggtggagcacggtgaggccgaggcattgcagcgccaccaccatcctcagcagctgcctcggccgccgcggcgcgagcaccctcacgttcgcgtggctctccgccatggccacctcgatgtcggccgcgccgggccgcgcgccgcagccgccctcgccgtcggcggcgccagagccggccgcattgttgtcaccaactgtggtagagtactgagggaacgtgaagaacccggcgaacggcggcgccggcggcgcgtgctcggcgcgacgcttctgggcctctagcgactggagcagctgctccagctccttgacgaagttgatggcgccggcgacgatcgacgcctggtcaccctgcagcagcaaacaccacgtacggtcgatcatcagcttagcatgcattggcgccacgcacacacaggacggcgcggcttttgatgcgcggcgaagtggtggtggtacacgagtacacgaccacacaaggtctcgccatagattccgtgacagatgcaaccaaagcgcccgctgcgcgccatatgcatatggccagggaggagatttgacatccgttacagtgaaatgttggggactcagcgcgaggcgatgcggtgaatgccaagccgttcgtccatgcatagcacacacgggcacgacgaggcgtagggatgatgatacagtactgatcgtgcgagagagggtgtcacgtatacgtacccgctgcgcgtaggatggcggcatgagggagcggagcacggcgaggtactcgttcatctgccgccgccggttgcgttccacggcgatgtggttgcgccgctggctctcggcctcctccttgttcttcaccaccttgggccgccgccgccgcctccgcgcggccgccttggcgtggccgccaccaccgccggacgctgctggcgtcggcgccgccggcggtgacgacacggggtactgcctctcgtcccagaactcctccacggcgccggaagcagcaatggagcgcgcgcaggtcgccgcgttgacccagaggctcatcatcccaccagcgccaccgccgccgccgccgtgcaccgccactccggcctcctcttgcagcaccacaccaccgttctcctcgaactcgtccatgtcaacgccgcatcccagcgacgacggcggcgccgcgtacatggcggcagcgcacgacaggtgctcctgcgggaacaccacagcttccagcgccatgagagccttctcctacctaccaaccaagcttccactcactcgctcagcctcgtaccattctagctagctggtcattagcacgtaccaggtaggcaagaagtggccaatctccacctgtgaccacaagctgagaactcgagattggcaagatggttactggttgccttccacctccaccatgggcggcgtgcatgggagggaggagactaggagaggagaggagagaactcgggtcaggggggcagcaaaaggtggtcccttttaaagagaagcttggaatatcatggatgtgctatggggacaacgacccaacctgccacggcacggggaagaagaagggaatatggggtatatacatggcgagtccaggggaggcaaaccacacgtatcctcgtgtccggcctgtcgcccgatgccacgttcgcgtatggtagcttgcttggattagcatagctttagcttaattagggatcaactaatcatccttttgtgggctaattatctggtgcagtacgcattggttattctttgattccatcttccttgtccttgttgaaaaaggtaatgcatacaaacagtagaatagactttgagagtcagagtgggagtgcagggaagtagtatgtagttatgtgctcttgatcagggtccctgtagtcttgcacccttttttgcgagaaaaagaaatgcttaacgaattgattgggggtgtacccccacgtaatggacaatgactagtcagtccaaataaacaagttgtaatcgccacaggaaatgacaattaggtgtacaatccgccagttatagtagaggtttaaataggagtcgccagctagctcggtgccccacggtcgaaagctgctgcctcatctacgcagcgtcacagcagtgggggagccacgagatcgatagattttccgctgcaagaattccctgatgcagaaaggagaagcaaccgttctcacgaaatcccgggtgaggctagggactttttaatctggatttcaggagaagatggggattccgtttagctgctaattctatctcctgcttcctgtggactgacgcatcaagttcaaccatgaatgctagccgccaatgatcctgttgactaattgcacggtgccgtgccaccatcatcagtgctcctcctaccagagaagaagatcaaccgatcgccgttagccgcctcttgttcccatcccctgattctctcgtctcaaacgaccgacctgacacgaacacgacggtgtgcccagcccatgcttgaaacagttcactcggaaaagaacaatcactttatcaacgctcgaaccaggacaaaacgctcccgatgcaagtactagtgtactgctcctcctgctacttctcgattcgtacaaagcagagttggagagacctgcaggcacctgtctgctctcccggacgcaacacgagctgcgctttatcgatcgatcgatcgctcggctggtggcattcagtccggcacccacggtggtggcggcgagcatataggccgcgtgcggacaccggcgtccatggcggcatccggaaaatctctgatgctgccgatcgagctcgccgctgttggatggcactgttggttggtagccgctggtgggctggtgccggtgctagctctttcagaaacctgcagagtgatgcaggtgccgtgccagacattgtggttccaagcttgcagctcaccgtgcggggagaggggtatccgggaatgtgtaggcagggtgggcaagtgattggtgagaggagatgccgctggtgattctggtgaaaggtagcgtgggtagcgtcagatggcagcatcgtacggagatgtaaagtgtggccggaacgataaaaagttgataccttttggttttgtttctacgtgcaccgatgaggttcctcacggcatgcacatgtacaaactcgcggtagcaatcgagacatttctccggctgaaacaagcaacgtggagtatgactgtatgaggcaatggcggcccacagctcgaagctggttgggccgatgcgtgaggctctgtggcgcagaacagaggaagcctcttacccacggcccacagctgggtagacttttgagttttgtccattcggacttccgtatacaggaacggaagggaggaaagaaacttgaaagtcctgaacgattggcgaacaaggatggaaatggaagcctaacgtatgaggcggtggcagtgacatgcactgaaatggagcggaaacgaaatgttcaaagttctgtctccatctctccaataggaccaatacaatccggtatcaatacctttcactgatattagcagaaacagcaaaacaagaaacatatgaaagaaatttgtaaggaaaaagtacaaatccccccgcccccggaactataacggccgatcgaattacacctctaaaccataaaaccagacatttttcacccccaactatgcaaaccaaaaaaataacccccttgactcaatcagcggtggtttttatcctacgtggcagtccagtcagctttcttttataaaaaaaaggtgggccccacatgtcagtttttatctctctttcccattcctctctatctctgccctcccctcacctcaatccccaccggcggtggcgagctgaggatggcggcgcgcggggggcggagccagttaggggtggcggaggagcgccgaggacggtggtggccagcgatggaggcggaggtcgatcgggcgtgcggggatgcgcggtgggcggcgggctcctcctcctcgtcgtgggcgcgcggtggaccaccgccaccaccgcgggctcctccttgtcgtgggcgcacggggacgcgcggtgggccaccgttgccaccacgggctcctcctcctcctctccctgcttgctcctgccactgctcgcccaaccgctcctgtcgccaccgaccgattccccttccctgccgctcccactgccgctcgcccagccacgcccgtcgccaattgccgctgatcggagtcgcgcccgctgtgcgcgtagctgctcgcgtcttaagttccaacgccacaacacacaataatagaatgacttgtgggtcctatattttctttattttattttttgctgattggatttccacgtcggtgtcacgtgtatgtcacgtaggattaaaaccgctccagattgagttggagggtaatttgtccggttttaatagtttgaggtttaatatgtctgtttttgtgtgtggggggggtaattcgtactttttttctaatttgtaaacaaatataacattttcataagttaactgtcaaaattctaaaagctacacttacgaacaatataatatcggagtggtagactaggaagaatgtcctcctgtgaccttggattctgcgttcattttcgttggcgtttgagagcaaaaaaacaaacatgccaaacgattctagaattcatgctttcgcacacggtgccccacaaaagcgtgccatcacgtctttgtgggtgccctggcgtgtagtttcctcgtttgaaacctcattacgttcgtcatgcatgtaacaaaaattaaacccgtgtttattatactctctaactagcagctagctagtgccgtacgttgcatctgggttagcaaccgaagacgatcaacgagcacgtagaattcttcatcgcaattagtaataagctaacctgcgaaattctacgacatgcacatcgatcctgacagatttgtttttccacaccaaacgcgcaggaccaaacctccgattcaatccccatgcatgaaaccccggtgcgtccgacttaatatttcgcctaaatagattgacggcacgtaaaacgagttaaataattggtgtatgattaatcgatattaattgctataaaaaatttaaaaagtgatatggtattttagggaacacttgtgtgtgtattagttagaaaacgtgctaacggaagatgatccatattttgccgcttgctaaaagaaaaatcacccacagctcgcgaatggcgtgaatcctccagaactctccagatcgacgcgcatacgtaaataacacaagggtcgaacagtttgccggttttggcatctacgcccgcgccgcgccggctccggtgccttgcacccctcaaacagcgcacctggcgtccatatccaccgcacgttgcgttgcgccaccgcacgccgaacgagtggctgcccccgcatccgcgggagccgcgcgcgcgacgcgacgcgacgagcacccggaccccacgatggaatcggccaagcgcgcgatagcctcccgcgtcctactccgactagcttggcgcccgtggcgccggcgtccctctcgcccagtggcccaggccgtagtcgtggcgagcggagcctatctatgccttacgggtcgctctcgcggccgcgcaagtgtggtgtggcgtggtgtcctgtgccgtctcctgcgggtgtcggcttggcatgcgggcggccacttggccagccacactgacgagtagagcagctggatagcgcgtggaccgcgccgcgcacggccaagctagagctgtactacgtatgtacgtgggccgccactttgcccgggggtggcgcacgccgacgtgccacgcgacgatcgggtcagctctcgatcagagtcgttcgttgggagatcgtcggtttggcctgtcgcctcaggtgacgtgacaggcgtcgtcgttgctccgtgggaattggggtgagcgaagcgaaggaagtcaattgttttgaagtccgtttcaaggaattctttcgctcgcctttggctgtgtttacttccacactaaaattaaaagtttaaaaaaattgaaacgatgtgacggaaaaattgaaagtttgtatgcgtagaaaagttcgatgtgacgaaaaagttaaaagtttgaaaaaaaagttagaatctaaatagggtctttatactgtactggttttacggaaacgaaggttagctttattgctgcaactggaaggccatataagcttggagcaacccacttttgttttcatggctcgggaaaaaatataattccctcatttcttctcttatatatcaaagaactttacaatgttctgtcgatgtgtcatatcccttaaaaatcatttataatatgggatagggagagtaataaaagcatcgccggagctgatccctggctccctgcttgtacttgcacgtacggtcattgtctcattgatgttcatagctgtacaatcgatgcatatcatgcatatacgttatgggcaatggttatcaagttgcaaaacgcatgaaaaacatataaagataccgtacacctgatcaatgaataagagggtggaacccacaaatgcgtcactcaactggcacgcgaatttatgttgattataaaacataatattttatcagcaacataaaaatgaattcatggataaaattttatatacgtgtcattaatgattttaaaaccaatgttagaaacaaattacaattgaaaaaaccttaaaatcaacttaaaagttgagttttaaaatttaaaatttggcaactgcctataagttgaaaggcaacaatgaggctgtttgttgcacaattttacacgaggttagatttaaaagtgcgattggattttgaaggtgtgaggaggaccaagaaatgatgcaacatgccattatttagagatgatggctatacttctaatcatggatggaaatttagcaatacaatttgcttctaaaaatgtcttatcattcgagttatgttagcaaccgttaatgcttttgcgatgcagacatatgggctgcggaatgtataatattaatagcttggttatagcttttaattaataaataaatgaaaggttaggattatcctaatatctataaaagattggattttatttagcacaactatttatttcattttcatagatatatttgtacgcattgattaatccttccgttatacactagaatgaatcatttgcaacatctcttagggcagtcccagccctccatctaggatggtgtctatggcattaactacattgccatgtaggacttttagtttatgtggcactatattaattgagagagagtgaagagaggaagaaactgggtctcatgcaagacacaacttcaacacgagaacctatgcactagacactatcaagttttgcattgggagagaattatcaagttttgcattgggagagaatattgtcttcataatagataaagaataaatatgattggtagagaagaaagatgatgtatttattaatggtctaatttaagaaagtatgggttgtagagtatagtttctattgtgatgtcttattgacatggcaccatagacactacttatggacaccataggttgggactgcccttagtacctgttcctttcaaagcggctattgctttgggcaactcctttttgtttgttaataggtttactggacggctaaacggagtatgttttatataaaaaataaatttatttttaagcttatattaattaatacctaattaattacgagctagattcacctttgtttccgagcctgtaaccgttgattcaagctacatgtggacttgctttttttagtggtttaactgttaaccgtttctgggtccgttacagacctgacaggtagacacgtagctgaaatcagaggagtccaaggtccaaatccaactggcatgcccagtcaccacactgcttctgaacacctggacggttcgatcgtacagtcaaacctgccaaacagcgtatccacctggccggacagcggaatccacatcctcccgcgagacccggcgcgcgccacgctatcgcgacgttctcgtcgatcgtcctcctcacaggtcacagctcacctcgacttgaccactcctacacggccctttactatttagtacgactccgcacgctgcatgcgcagggaagacgactagccaaggcgccctcgcctcccgccgccgaccacgcgcgctatctgcatgccaagttgccgagctaggatgcacgcgcaccagcaccagcacgcgctgctcgcggcgctcctcgcgtgcgcgctcgcggcgtcgtcgtcgacggccggagcgcagccggcggggcagcaggggtatgcctacggcgacgtgtccgggcagcaggtgcacgtcagcacgacgatgatcgtgctgctggccgccgtcgtcggggttttcctgttcatcgcgatctccaccatctacctccgccactgcaccggttacgaccccgcgacggagggcggcggcgtcggcgggagccgttccatgatcctccctgccaacagcttcgtctcgaggcggcagcggcggccgcgcgggctcgactcgtcggtggtccggatgttccccaccatgaagtacgccgaggcgaaggcgctgcgggtggggaaggtcgccggcgccgcgctggagtgcgcggtgtgcctcagcgagttcgaggacgacgagatgctcaggttcctgcccaagtgcagccacgccttccacccggactgcatcggccagtggctcgccagccacgtgacctgccccgtctgccgccgcaatctcgaccctaacaaggacaccaccgaagaggtgatcatcccggccgccgccgccgccgatccgaacagcacctccagtgaaatagttgtgatacggcaagaagacggggcgcacccagcagccgtggtgatcgacgtggtcaccgaggaggacgacgaggagcggaggaaggaggagctagagcttcaggcgataggcacccagctccgcgcgatgcggtcacggtcggggctgcggccaaagacgtcggcggcgaagcttccccggtcgcactccactggccactccctcgccgtccggctcgacggcgacctagagcggtacacgctgcggctgccggagcacgtacacagggagatggtcgcggcgggggagcagagcgtgcgccgcgggaggagactcggggaaggggtcggcatgggcgctcggtgcagcccccggttttcgcggtcgggcagatggtcatcttttctctcaaattctttgtcaggaaagctgtctttcctctccccgtcgtcgaggagaacgccggatagcacccaggtggaagtgtcatcatcctcgtcgtcgtcggtgacgaaggtgaaagggaagcgcgtggccgccgtcgatgttgccgacgacggttctgctcatgggactgcacagtaccctggttgcactgtggccagctcggcggcggcggcggctgtggacgtggagaaggcagctaccaggcaagttcgaacatagaaaacgaacagaagttttgagtgagaaacttgaacagttgaacttgacgtcatgcattttcccacatgaaagaaagaaatggtctttttttgtcggtgggactgtattctgtactctgtactaggtatattatcaacgccgatatgcccaaatattatgggagcacctattgatcaatcaggtgactgcagaatagcaaaggcgaaataatatacatactaggttgaagaaacttagatgcttttttttttttggaactagaaacttaggctgtgtttgagggagaggggattgagaagattggaaagatacgtaaaacgaggtgagtcattagtgcatgattaattgagtattaactattttaaatttcaaaaatggactaatatgattttttaaaacaactttcatatagaaattttttgcaaaaaatacaccatttagtagtttgggaagcgtgcgcgcggaaaacgagtgacaatatctccaatctctccccaatctcctttgaaagaacgcacccttagatgtgaatgtatattattgtacatgagcaaatcagtagaataaaagatgcctgaacaatcgcacgcagtatcattttgtgtctttaattggatagataattatattcatcctagctcttacactgtggtttgtgcaggagacgaatgcataaatgaaatgttaggcattaacacccgccgtttcggccgggcgcaggctctgtcaatatgactggtaaaccatctccatcgactggacgccgagggtaagaatttaactttacaattcatatcgatgatcgatcaatatgtaagatttgccaatacatctgaataaactgaagcctattactacatagcagaagtactaatgcagcctccttggaatggagtattttcgtacaatctgaactaactgaaatcttatcccttcctggactgaaagaaaaggaaaataactctctattttttggcaaataatatgtgcaatagttttgatgtactgttttgtctgcccaaggttaacatcaaaattcttagaaaagaattttcaagatcaaattcaacctagtcggctcaattaagaacgactttacctttagttcccttctagacggtaagcgattcagatactttcacatgtttttttttcagggataatcattgctttatgtagatgacaacgatatgaacttttttttcttgactttgtacgtgcaaaccgtgctgaaaaatggggaaaagttacaacgagtttaatgggacaaccaaaatgcatggaaacaacgtcaactactatagctgtcgcctgtcaggtatacaacgacgatggacaaaacagactacagggcaatctggtcacagggtggcaaacagcaccagagaagagacattttagaaatgtgccttttcaatttcaagtttataaatgttattcttcaagtgacaacatttggagtggcatatactcctaacaaaatttacatagcccattcgaaacaaactattcatcagattatgatatgtcaaaaattatctacttaattgagataaattaaatatttgaaagaaacaaaccaaacaaataattttaaataagtattttaagggaacatacttttatagaggcgagaagcaaatagtaataatctataacgatccgattaggaatggcaatcctgctctgggtccgctacccatggcccatgggcaccgtgtccgatgagtatgggcgtggatttaactaggtgaaacccacgcgttgttgtgggagtgtagtacaataataactagtatggtggcccgcgcaatctgcgcggctagtatcattatattttctctcatataatagcatatatgttttctcaatatattattcaaatatattaaaataacaacataattttaaatttttcaataactttacgaaactactaatgtgtaatattcatattgtattttatatacgtgtgtcacatcctgatttttgtttcaggatttataaattatttaataaattattattagaatttatattaaatgttcattaatttacaagtgaagttaaatgtgggaaataaaattttctaaatataaagcatggatggatttaattttgattaaattctccatgattaattacactctctgaaattttctcagatttttcggagctcaattcttaattttttaatcatacaaagagcatttcagtaattacccacatattaaattaatcattaaatggtctggttttaatattgttaaatactttgggtgtccaagtatgttcaagatttttcttggaattatttgagcataggaagtatttttaacaatccaaagatcatttcattgattaatttaattggaaaagtaataataatcctcttcctagtcttgggccctttccagcccatctccctcttttgtctgcacggccgtgcagcccaagtcggcccagccgagcttcccccttctctttctttctttgctttgttttcagccagcccaagacgaaaagtctaatttgcctccctcgacactgtttatcttctacctctagcagccgaactgagaccgatttggctcggtttttctcctccaaatctgacctttccccttgtgtttttctaaaattagttgaggggaaatatttctcttatcctcctctatctttacccccaaaaataggagctaatcgttgagtatcttatccgaatcgaactcgttttcgagtttatctccaaaaccgagtttttgatttcccggatcgatttcttgcgggaggagtccgatctcttcaatccaaggctataaataggaccccctagtcctcctctttcgtttgccccctctcccgtggtctcccgtgcctcgtagcgccgccgccacgtgctccaccccgccgtcgtcgccggccgtcgtcgttcgtcgtttggttcgagggtgagtaccgttgggttcgtctcgtcgtcctctacgtgttcttgtcctccaaagtcgcagccgaccatccaatctccggcgaggtcgccatcttggttcggccattgatgaggtcatcatcatgacgtcatcatcgtttttttttctttttcctgtttttctaatagattaaatcttcggaaattcataactaaatcatcgtaactcggttttgagtggttcaagttgctaaattcatctaaaatcatgatctacatgtttgtttactttatatgtactgtttatttggtttttattagtctttttcttcgttttgcgtgttagcttgtcgtttccgtcgttgcgaaggttcgtgagtgcgccggaagtattcaagaagattaattgaagaccgattattgcaagacaagtcacacagatcctaaacacaatcctttgagcatgttgatcatatatttaaattccctatttatttcaactgtgcatttattttcgaatgtcaccgggtggtgtgaacctattcctttgttatggccaatttgcattgattactttattccttgataccttgggtaacaaattgattagcttgaaccttatatattggtttggttcagctaaatgctatatatatatatataattgcttagccatgcttagaaacattatcacataattaggataactaatgttacactatcacttatgattatatttaatggtagctcacgatgtttaatcgtgttatgataattaattgataactaaaacttgacaatggtgggttgtgagcacatggttttgaaggtcgtgctcatgacaattaaggaccagttcacgagctactgttgtgaaacattaaccgtaccaaccacaagccagcatgggcaacggctttaccttctgtatagcatgattcattgcggggcaccagactgagaagcggcgagaagtccgtgggggtcgctggggagttcatgcctctggttatatttatagagggggtgattatgatccaggaatggtgcactgtggtgagttgtgttgtgcaaagggtattgtcacagcctctattcgggtactttccagtatcgcgacgcatggtagacatgttgatgaggctgtgtcttgtggatacagtggtacacctctggccagagtaaaactattcgaatagccgtgcccgcggtcatgggcgggttgagcaatgtttttcgtgattagtctcacacctctcacaataattatggatgttatacctggtaataatttgcttagctcctggtttggagttagatctgtacagccgggtatggttgttcaggatggttgggcctgtgcagcatgggtgtgctgttcagtgttgattaaaatttctgattaattactccactgttttacttctcttaaatgttttgctaaatgctgcttttgcaaatgagcctatattatgccatcctttggtatccttgtgcacttgcatatttgctgtgtggcttgttgagtatgtcatatgctcattcttgcaataatcaatcaacctcagttgaagaaaaaggatccagaaggagaagacgtttggcttataccccagttgagctgcctgtgggagtggagccggagcttcgctagattttatattccgctgcagttttcttttcttttgtaagtatgtaacactattattgatgattctgtatattaaattgtcagtttgtgtacctcagctgattcctggacgagggttctatgcacaaattagttcggaaattactagtgaatttctgggcgtgacaacgtgttagttattaattatttttaacataaaattttagttatttgtgaattatatatattcctatatggactctagactcatcttttaatatttctttttttaattccgaattatctgtaaattgtatttatatatagactctaggctcttcttccaataatatttagttttatttctaaatttttgttatttctaattgtatttctatgtggactctaaactcatctttcaatattctttaatttttaatttcgaatttcatttacttctaagttgtattcctatattgactttaagcttttcttcccatgtttttcttaatcacgaattttagttttttgtaaattgtatttttatacggactctaaactccactttttaattttattatgttttttccgaattttagttagttttaaattcctatgtggactctatactctacttctaatattccttgttttttaattctgtatttctattttttcttaattgtatttctatatggactctatactctacttcaaatattccttatttttaattctgaatttctattatttcctaattgtatttctatatggactctatactctacttctaatattcttttttttaattccgaatttcagttatttcctaattgtatttctatatggactctatactctacttctaatattctttatttttaattccaaatttcagttatttcctaattgtatttatatatggactctagtctcctcttctaatattccttatttttaattcctaatttcaactatttcctaattgtatttctatatggactctgccttttatttttctccgattgtatttatatatggactctagtctcctcttctaatattccttatttttaattcctaatttcaactatttcctaattgtatttctatatggactctgccttttatttttctccgattaatgtgagaatttctaggccatgagagcgaacgtggaggctcctttttctattcctttaataatataatagataagtaaaaataatatgtaaaatagctagataatataagattatgtaagttaacatgatttatgataattttaatgtaaatggtatatagaaagatggttcaaatgtaaaagtaaggtgatatgattttatgagagaagaaaagtagtgaaatggtttgaaccgtagattaatcatctaaaagctaaaaacaattgtgacgatatggcttaatgagagaagaaaattagagatataatttggatagtagattaatcgtttaagcactaaaaaaatgatgcaatatgacttaataagagaagagagaaataacattaaccaagtaaggatgatctatatagatacataggatattataaaaaataatgaaaacatatattgaaatattatgtgaattatgaaagatgatgatttaacgtgcttttattttaaaagctctaaaattttataaatttcaaattatagatagtatagtatgtttgtataatgtttaaatataatgattgtcagtggatgataatgtgtcagcttgttagtagatgatgatttgatatatttgcatgttaagatttaggagttagtgtgttataacgttattatagaagtagctgaagtgctgaactgaacgggatctgaacaggccagacctccgattggatcagctatccaattttgatgggccattcggacggcccagtcatcggtccgttggccacgcgatttctcaggcgcacctccgccgcaacgcgagtccccccaccgccgccggccgcggcgcgccgccgttctgacgctccacggccacatgaactgccgccacctcgccctccggctccgccacctccgccgccttctcgcggtcgcacccctttcctcgctcgcggccgcgcactccgctaaccgctcctccccacggctaaaccccacttcggtgccgccaccgccgcggcagctgcatctcccgaccctccaggctcgacggctctgctccaccacgcacgtcgtcctccccacaaacctccaggacgagcggttcgcggctctctcggataggatctacgacgccgtgattgagaccgcggcgggttccagcgagggcacggaggcggcccttgacgcgctgggcgccgagctgaccaccccgctcgtcgccgacgtgctgcatcgcctccgttacgacgagaagctggccttccggttcttcgtctgggcgtctcaccaggacggctacgagcacgaggccgcgacgtacaacgacgtcatcgacatcctctccggcacgcggtacaaggcccgccagttcggcgtcctctgcgacgtgctcgaccacatgaagcgccgccgcacaaggtccgtgccggtcgacgacttgctgggtatcctgcgcgcatacacggagaagcacctcacgcatctcaggaagctggctaagaagcggcgggtgcggatgcgcacgccgccggagaccgacgctctgaacgtgctgctggacgccttctgcaagtgcgggatggtccgggaggcggaggtggtgttcagccgcgtgaagaggaagctgctggggaatgccgagacatacagtatcctgttcttcgggtggtgccgggcaagggaccccaagagggccatgaaggtgctcgaggaaatgattcagatgaagcacacccctgagaacttcacttacaatgctgccattgactcattttgcagtgctggtttggtctcagaggcaagggatttgtttgagttcatgagaacagaggggtctacaatttcatcgcccacggctaagacatactcgattatgattgcggcgctagcaaaggctggtcagatggaggagtgctttgaactgatttcagaaatgagaaagtgcggctgtatgcctgatgtgtcgacatataaagacttgattgaaggcatgttgttggtggataaactggatgctgcttattgtgttttagatgagatggcaaaggctggctttccccctgacattgtcacttacaattgctttctgaaggtgctttgtggtcttcaaaaggctgatgacgcgcttgaactctgtgaaaggatgatagaggcgcattgtgagcctagtgttcatacatataatatgctgatggtgatgttctttgagatgagagagccagatagggcaatcaatatttggatcgagatggacaagagaggatgccatcgcgctgttgatacctacgaaacaatgattgatgggctgtttgattctggaagaacggaagatgcgaccgctcttctagatgaggtaataaaccgtggcatgaaactttcgtacaagaagtttgatgctatcatgttgcggctatcagctgtaggcaaccttggcgcgatacatcggttgtcagagcatatgaggagattttacaatgttgcaatgtctaggcgttttgcaatcacacagaagaagaagagcataggtctgagaaggaaatgaatatttcgagatttcttgttagtgcagatgatcaggagtttatatgaggttagctaattattggtttattattgcagcaattggttgtcacttgcaaatgtattaaaatatttcctgggtcctatataggttcagtgttattttaccaatttgtctaggagtaagttgcatctgtgaaatgctttgactgctggttgcatacttgaatagaaacttgcatgtagctaatagcaacacaacatcactcttatgtaccttcaacatagaaaagcacaattagttacatttttggtagctccaacactttgcagtgtgtttgtttcgtgcaatcagcataataatggctaaattggcgaagcaaacaaaaatatttcaatcaattgttcttatcttacctgcatttcctggtagcatttgtttggcaagtggcaaccctcacatgtagaccttatgatttccttagttctgcaggaaggatatgatcccagtttcaccatgaaaaatcgtctctgatagccgtggaaatcaaactaatacatagcttttcaatcattatgggaagcaacctcaaagtgaattcgtaacaaaaaggatatccaaccaccccaaacatcagttcactgcctgtcagagatgccatcagcttaatgtacatttcatttatgacctaacctgtttaatgataagtatgcagctgatccaatgtagtgattttcctttttgtttcccactcattattggtctctgataaaacacatgtgatgccatttatttgttatagatatcacagaaagagtgttgattagcaatattattacaagctcactgaatgatcataataaatcttgattcctgaaaaagtaagaataccagagcggtgatactaataaacatcatatgctaagggctgtatgttttccatattatgtttggaacgtctatatacataagcttattaaatatcaggatggaggaacctggaatgcttgtagaactactatcatttcattactgaaatgggagaagtttctttcttagaaaaaaaaatcaggatggacagtttctactgggtttgagtaactaattcaggtatgttatccctatctaggctgtaagcaggagtgtaatgggaacttgaatccgagccaggatataagtaaaaagttgaccaggagaattctaaagcagtaagtcagtaactagttttaataatgaggtcagaaggtttgctagctagtgtctatgatgtttcatactgcaaatttcacttatttgtgatatatgcgctttatagagtatgatattcatatttagttagatcatggcagaacattacctaaacattataaaaagttctttacttactccctccgtttcacaatgtaagactttctagtattgcccatattcatatagatgttaatgaatctagacatatatgcgtgtctaaattcattaacatctatatgaatatgggcagtactagaaagtcttacatggtgaaacggagggagtacaatacaagggcattcactttcagtcatttgctttctagtttgatttatgctaatcaaaagctatctttatgctaaaacacagtttacttttacaagctggttgatggatgtccacacacagatcagtggaaaaacttcctgaactgcatgttttgcctaaagaaaactagtgctgtgagcctgtgagcgctttaatatcacaaggtaactcccaccccagaatgtagaaagtacaccaggcttatgcaccatgcccgattagctcatccacctgctaaccagcaagagaaacattggctgcacgggatcttgttcatgctgaatcctttttttcttcatgctaaaacatacttcctccgtttcgaaatgtttgacgccgttgactttttagtatatgtttgaccgctcgtcttattcaaaaaatttaagtaattattaattcttttcctatcatttgattcattgttaaatatatttttatgtaggcatataattttacatatttcataaaattttttgaataagacgaacggtcaaacatgtgctaaaaagtcaacggtgtcaaacatttcgaaatggagggagtaacatagaagctatgcatatgcttcgagccggaatagaaaagcgtaacactcaatttctttgcgtcaagcatgcaatttcacacacctatcttggctccatgtacatgtttcctacaattcgtgagctcaacttctcgggggacatgtgactgacagcttgtcacaggtagaatcatttgattcatttatagccatacccatcaagttcattggagataaaagaggaatgtgtgtaattattttatgcagacacagcacatctgcatttctggtcgtgtagtagtatggtaaaaatactagtaagccgcagtatgctcctgacagaaaggtgatactaagtttggtaatttgactggtatccacagttatccaccaccgaattttagtgtatttagtttgcacaccgcagcatataaaaaattgttgctagttgtgtctagtccctgcagtagaagatgctaatctagtaaaacccacgcatggttatagagattgtaaattggaaaacataccaaaggactggccaaagaaatttgccatgcatcacactttgctgtggatgacacatttcaaactcaataggttcactttatttcataacgtgaagtttcaaaccaagcatttactggctggtacctataggtgacaaacagaaccggccctctctttttttgaagagagaattccttatatgccattgaaaattggtttgatcctttatatgccactaaaaattggctcttcccctatatgccattagttcaaatttgcgcaccctctcatgccattaccgtcagttgactgtgtgttgaccgttaagtctaaaataaaaaagaaatatttgcccttctaagttgttaggcatgtcctatacccagaagggcaaatacgtcttttttactttggatttaacggtcaacacacagtcaactgatgggagtggcatgagagggtgcgcaaatttagaccaatggcatataagggaagagccaattttcaatggtatataaggaatcagaccaattttcagtggtatataagggattatctctttttggaaccaggggaggaaacccctactccagtttcacatgaaaagaagcaacatcattctttgccaaggaatttttcacgttttacattccagtaatgcaccgttcaacaacttatattcccaattacaacctctctagggaggacaatgggtagactttgcaacttgcttgtttgtgagtgccaggaaaatttagtggctcgacatttcagctcagacttaaactgctcctcttcatgccattgttcttcatccatttcctagaatcactaatccatcattagcttgcaaagaaataaatgttttctgctactagcctactaccacatttacaataccagaaagatcactatagagctgcttcactatactgcactcaaacaggagatgattaacagtttttaaactggaaccgaaaagacaagtcatatactcatatcatctagtatgttttgtctcttactaaggttatctcgatttagattttttttcttctgaaggggcatctcgtttgaattttgttaggagagactaaccagagacagatttgcacaaaagaaaaaaagaatggaacttggctgaaaacttatggagggactaggacgtgacctgtaatctaggcctgggataaggcctcgtttggattggattgaatctattttgcatatccattgtttggaacaatggattgcttcctaatgtttgatctgagaggcaaataaaaatgagctcagatctcatggaaagctttttccatacgaagcaaatgtacaaatggacctgatttctaatccaatatttctttcctgtgttttgaactgatctttatgtgtcttatgttcctctgttttgccccattcctgcatccttccgtctaacgtttttctattcatgcttcctactaactgggaaatctgaatgttcgtgcagaatatatgcgaccgagcacttcggataccatacaccgtgcggtacagacgaaaccacgaaaccctctgaagttgaggcctcgtgagcaaataggcgactgcgtccgggtgccgacgagttttcatgagttccgaggtaaaatacggctggtcctagtatctttgcgaagtgatatccacttctccagttttactatcccatgcgttgcatgattatttgagccatgtgtagacatctgatgctacactgctacagtgtactgtcatcgacacggtgtgtcttcgtatctgtgcgaagtgatatccacttctccagttttaccatcccatgcgttgcatgattatttgagccatgtgtagatatctgatgctacactgctacagtgtactgtcatcaacacggtgtgtcttcttttcctttgggctttggctgtcgcgtttttggcgcgatcgccgaggaatcgagagtattgaattttagagcaagtttaatagtatagcctactatgagtaagtataataatgagttagagataacaaaaaatcaagcatattggctttcatgcaagaactagtttaacacaagctcctagttaaatacattaaatgcatatgtgagagatagagagagaaaaagaaagttgtagccaaccttatagctaatccattatatatgttggctttaagatgggctaatagtatgaagtgagctctactattatccttgctctactagctccaattcatctgtagccaatctaatagccaattcatacaatagttgcttactatactattaatatatggtcccatctgtcatacacacactgtctcttggagtccgtgctgcagctggctacagatttgtagtccgctgcttttctctttcatctttatatcattaaaatatatttatagctggttaataatctggttaataatctgctattgtacctgctcttactcactgtctctcttatcaggattcgcggcggtaatgaagcaggatcgtgcagcattaccgtttctatattgcaccatcaacaacaagaaccaagagatgttccactcagaaagacctcaagaacaaacacaacgagttgcacgccgcacagatcaaccggaagattaatgaggaggacaacaaaccaccgactgggatgactacgctaccacgcaagtttgactgcccttgttggtgtggagccgttgtgcgcgcgagccctttcgacgacgacgacgacgacgccgaaactttgcactcaccgcctcgccgaacgggggaaactttggttggcaggtggacacgtcggggggtggggggaggcagaggaaagcgagcgcacgagaagtccagttgggtcgcgtcgcgccgcgcttggctttgctcggcttgttgcgtagcgaagcgttcgtggcgcggggcccggctgtcggtcggtgcctcggcggcgcggttgtacagtgaggcgttgcatgtgggggtgaggcagcaggagcggccatgctttgtgaatctctgcaatagtgtgggcggttaagcaatgaaagcaattgactgctcgggtgtgtgacacgtccctgttgaaaagccggaccagccttcaaactttgcaagcagtaggctctactctaattagcctatgtgggtacttagtactgtatttcttgtgttgggagcaaggaataattcggtaaaatgagactgagataaaacaattatgagacattgcgaagttgcagcttaggcctgtttagttttttttaaaaaaattcaccttattaaatcgaatatctgtacacatgcattaattattaaatatgaaaaaaaactaattatatatattccgtgtaaattatgagacaaatcttttaaacctaattgcgttatgatttgataatgtggtgctacattaaacatttactaatgatggattaatcaggcttaataaattcgtctcgcagtttccaagtggaatctgtaatttgttttattattagtctatatttaatatttaaaatgtgtgtccatatatttaatgtgacacgttaaaaatttttgttcgagaactaaatagacccttagcttcttctctggctccatgaaaggtggttttatccttggagggagataatcaccgtatttgattttgatgtcaaatctacgtcgctaccgtgtcgaaacactaccattgatgctcgttgagtataagtaccaccttaatgataaggtactcgttgcatgagaggggtactaagttccgacgaattgatcgtcgcaactcctattgaggaggcttggcaactgttggcaccctccagataacatcgttcatagtagtcgtgaggagtcattgctccctccgttgcccatatacatctatatgttaatgaatctaaacacataaccccgttcgtttctaatgtaagaagtggatgaaaatttggatactagtgacatacttttcaaactgctaaacggtgtgtatcgtgcaaaaactttctatatgaaagttgttctaaaatatcaaattaatatatttttcaagtttataatatttaaaacccaattagtcacacgttattaccacctcgttttacgtgaaacacttaatctttatcttcatcctcaggaaattcaaacaccaccatgatacatatgtttagattcattagcatctaaatgaatgtgaataatgctagaaagtcttacattgtgaaattgaggaagtatgatatatcgtataaagcaatgttcaaggttacaatgacggattataaccctcgcaaaaaatatatatgacggattataacaaaggacttgcttgagaaatcaaacacacatggtttgaggcaacgaggaacaattgtgtgtgcgcggaataggcttgtaaagttgcaagagcatactgcagacgtagtgatattttgcgatgcggattgccatgacaaggtccgatgcgaggacattactgcattatgcagatcaaagatgtagaattcaatgcgaggacagacacttggttcgttaagtagcaccgtgtttagtttccaagtttttttttcaaacttccaactttttcatcacaacaaaacttttctacacacataaacttttaacttttctgtcatatcgttccaatttcaaccaaatttctaatttttgtgtgaactaaacacagccctagattacaatcacaagctctaggcctccagggtccaggcggtagaggttggcactgtagttagagagaatacggagtaaggccttgtttagataaaaataatttagctaagaatgccacatcaaatgtttggacacatgtataggatattaaactgtagaaaaaaaaaacaattgtacagtttgcatgtaaattacgacacgagtcttttgagcctaattacacaatgatttgataatgtgatgctatagtaaacatttgctaacgacgaattatttaggcttaataaattcatctcacagtttacaggcgtaatttgtaatttgttttgttattaatatacgtttaatacttcaaatatgtgtccatatatttaaaaactttaaaaaaaaaactaaacacaacctaagcaagtgaaaaagaggagactcacgtatcaaagatggtccctacttaagtaggctgatctggacctattggatggatacgagctctctaggtttaggcttaaagattagtaggattaattgccttaaataaactgctaagctgatgtttaaggtatttaatcccttaacctgggctatcttctttagaatctagtagtatgtaaattatttgcttctgaatttcatatagtatttaaataaaatatgtttctttggaactcatgaatttttacatgggtcaattcccacaaaattctttcacctctaggaggtcattcgcgcgctaagcatcagtattattttaagaaaagtacaccgatagttaaaagcattattactattctagtattccccttgaaattggcatggttatttcatccccaaaatttgcttatagccatgcacctgatattccaagatttagttactgcacacaatattcctgtgtttaagcttacctccctcgcataaaacacaacatctaaatttgtaggcactctacatgaggcaagtcgttacactttgataaaactggagcctaaactaattactactactagcaccacacattaacatccacaactttaatcactcccagttttaccaaacctgccgaaacagatgcaaatcttgatggctccatgccgagagaagaaagaaacaagccattgctatgatattgctatgctatgatactacatgaactactgctgctgctactccatgtcattttctcccatcacagtagtgtgaattgtgatggtcaatgtgcattcgtcctgttccttttctttcttcctccgggcaccatccatccattcttgctcccaacaagcccaaaactgaagcgaagaaaaggagaaaaaaaattgggagggagtgagagagagagagagagagaataaaaaggcttttttgttcgctcagtcccagtccagctcgctgctcagatctaatcattatttaatcctttttccgcagtgtcacatgagcacttccccctcctgctcctcctcctcgccgatcccccaatccctaaccctagcctccacctcctcctcctcctcatcctccgggatgcgcgatgcgggggaggggtcggactcgccgccgtcggagatgtcggaggatgggtcaggagggagcggggacggggacggggacggggacgggggagggggaggcggggacaggtggatgccggatctgaggggagggaacggcggcggcggcggaggaggcggagggggagggaggtgggcgccgccggaccaggtgctggagaacgtgctggagagcgtgctggagttcctgacggcggcgcgggaccggaacgcggcgtcgctggtgtgccggtcgtggtaccgcgccgaggcgcagacgcggcgggagctgttcatcggcaactgctacgcggtgtcgccgcgccgcgccgtggagcggttcggaggggtgcgcgccgtggtgctcaaggggaagccgcggttcgcggacttcagcctcgtgccctacggctggggcgcctacgtctccccctgggtcgccgcgctcggccccgcctacccgcacctcgagcgcatctgcctcaagcgcatgaccgtctccaacgacgacctcgcgctcatcgccaagtcattcccgctgttcaaggagctgtcgctggtgtgctgcgatgggttcagcacgctaggcctcgccgccatcgccgagcggtgccggtacgcttctgtataaagctctcgtctgttttggatgatgcatcccggctgaatctaagtgccgcagctagccaaggatatcatactatcattggtgcatttgatcaatgcttagctgcatcgtgcaattctgctttttatttaatgtgcacgcagtctttacgctttttagttttattggtccgattctgccatgcatcagaatctgattttgggagagcttttatggccgtgttggtttctcatcgctacacgtctcctgtcgaaattagatctttattgttcttgacgatctaatcactaagtgtccgacacttgttagtgtcacaatcgaatcttggagtggcaagtctccgagttactagctgcaaagtttttccttttcttgtttggtctgggtgtggagcagttctagtaaataagcatgaccatcccaaagtgggatagagtgagacatttcacattaaaaattggtgtctcttctgcttttcctcaattaaaataggtttatgtcactgaaatgcggtatctcatggttttgcacaattcatttttaggcatctccgtgtgctggatctgattgaagactatattgacgaggaggaggatgagctagtggattggatctccaagttcccggagtccaacacgtcgctggagtcacttgtgtttgattgtgttagtgtcccattcaactttgaggccctggaggcgcttgttgcacgctcaccagctatgcgccggttgcgaatgaatcaccatgtgacagtagagcaattgcgccgtctaatggcaagggctccccagctcacacaccttggtactggtgcattccgttctgagccaggccctggtggtgctctgtctgttactgagcttgctacatcttttgcggcatctaggtctctgatttgtttgtcaggtttccgggatgtcaatccagaatacctcccagcaatccacccagtctgcgctaatctcacttcccttaattttagctttgcaaacctaactgctgaggagctcacaccgattattcgcaactgcgtccgtcttcgcactttctgggtaattatcttgtcagccttctcattcccaatgcataaatatagatttatcttttgtgaatgagaataaatattgatgtatgtacgtcaacttagatgtttttgttcgaatttcttattctaggttctagatacagtgggtgatgaaggccttcgggctgtggctgagacatgctcagatcttcgtgagctgcgagtttttcctttcgatgccactgaggattctgagggatcggtttcagatgttggtcttcaggcaatctcggaagggtgccggaagcttgaatcaattctctacttttgccagcgcatgacaaatgcagcagtaattgctatgtccaagaactgttctgacctggtaacattccgtctttgtattatggggcgacaccgccctgatcggatcactggggagcccatggatgatggttttggggcaattgtgatgaactgcaagaagctcactagactttcagtctctggtctgctcactgataaggcgtttgcatacattggaaaatatgggaaactaataaagacactgtctgttgccttcgctggaaatagtgacatgtctctccaatctgtgtttgaaggatgcactaggttgcaaaagcttgaggtcagagatagtccttttagtgataagggattgctctctggcctgagctatttttacaacatgaggttcttatggatgaattcatgcaggctaaccatgaggggttgtagagatgtagctcagcaaatgcctgacttggtggttgaagtgatgaaggatcatcttgatgatgaaggggagatggagactgttgataaactgtacttgtatcgatcactggcaggagcaaggaatgatgcaccttcatttgtcaacatcttgtagtactgctacaggaagaagtttgttgtactcacaaaacaagtttgttctattaaaccttatcattgctattgtattcctgaaccctgatcagtctatcagaatcagacacagaagcttcccgcagatgattttcaaatgtcgtggggaacttcgattatgcggatctccaaattgttcttttctttgctgacaatgaggcatatgaggctcttcttgatgtatgtattgttgctgaggagaagttcgtcgagtgagctacctgatgcctgatggggatccttcttttccttgctgtgactcgactgatgcctaccattttactgttagatgaagagtaggaactgattccaatcagcagggttagattagccatcttttgatctgctcagacgaaggaatggcaatgctccaatattccatcatccgttgccttatgttttagatctcaaaactcaactatgataattgtttcctttttcatttttttggggttctctcttgagttatttttgtagtccattttaccccccttttacttggtcacgtcgctgttatgaatcaagaagctattggaggaattgaaatttaatgcattaatttgttgcctgtctctatcagccattcagcctatcactgttccattgccatgatcatgttactttgaccatgactgctcaattgctgctgctactacaataataaatgccctaggctgtgcattgtcatcataaggacaggccctactaatgatttgatctcagaagtcgtccttgttccatttagatctttcatgacatcaactgcctgattcctatttgctttttatccttcccttttcctctgcatctttcaggatcctggagggagtgaagcctcaaagcacccagctcaatgagacactgagagcaagctagcaactactactcgcaagtgaagagaaagctatcagttactcatggccagccagcctcatgtgaggaatcccattgtcgcatgtaccgcctgttgcgcatcatcttccatctgcgtgctaaccactactgttgtgtagtgtcccagaaccctaagttgtccccaataattaacaaaaaaacagggtgtcttttttatcatggtcatttaaacctacactttagatctcttgagaggctggcaaccatgtgatttgcttcccagggtcagtgcatcttgcatttgttttttcaggctcgagtttaagccgcctttctccctgcatcatgagctgcatcagggggtgatgtgatggcccatcttgatagagatggtcttgtgaggtagtagtagatccagagctttgtagatctcaggtttctttgagtgttttctgggagtatgacgctaaccattgtttatggtgtaacccagtgtctaccattaagatgttgtcgggaaggttaagctcttaaattgcatttgtctggttttgtttgtgatttcatggggagaggtatattgtacagcaaaccgagcagccaaaggaaccacttcttttgtgtaggattaggaacttgtcacgaagttttgccaaaaaaacggtgtgcgcctacctgccaacctaggatgctagtattatctctctcttaaaatatagcagcctaatattagatatgacacgtcttagtaatactacatattcaaatagtcctgatacatattagtactatgaatctgaattataatatattctatccagtattagattgttataggatagttctgacacatcttactactacaaatctatattataatatgttctataaagtatttggttgctatagttaagaagggaaattgctatagtttagaaggggaagagtagtaaggtaggagacgaaggaagtttggtgattgcattgttttgttaggtttcagagcctgtgtaacgtgctctggaccgtgacagtgagcagctgatgccttgctcacatgcacgttggacacttggctgtgcaggcaacgtgcggtcatgagcacgtttttttgtgcagcatctgtgtacctaaaacatcttaggcctaacagctttcttttgccgttgcattggatgagtcatacacaactctggtctcttctgttggatgcaaaaaaaaaaagtgattgaaaaaaaatgtggttgttacttgtaacattgagatgatatactaggatatatcagtgatcagtcagtctgggcctgagaaaacatgaactgttatgcagaaacttcgtggaagcatccgccgctagcgttaagtcaagggtcacttcgttgtgtagtgtttgccaactgttaatctatcttcattagtatcttgcaagtcagccttggatgtaacctgaagattgcatgcatgaactagccgcattttcttgtcaaatatgctatccaccccttttcttccaactccaaaccagccaatcagttggggagtaggaaaaactttgtgtgcctcaaattaaaacaaaataatgcagatttgagtctctgagatattattccccttggtttaagccacaaactggataaattgtcatttcttcaactatatttcaaaacaaaagccagaatgaatatcaaaacaaatgtgacatgcctttaaaagatctcatcaagaggctacctagcatccattttattaaggaagtctgataatgcatatgtttttttaaaaaaaaattagaagagtttattaacacagtgatgttaagggcttattttaattgcaggaaatttattagtgagtataggataaattttgcaagagttccacacctttcattgaactgttccatgtgaaattcaagcgctctacatgaaacataaccacagatgtataagtgacaatgtcactatcttccatttagcatctacaatgatattaatcatggaatgagacaagcagcctacccatgataaacacccatgccacaagctagtatatatcaatcaaaccataaatgctctcatcatacatgtgccaaagtccaccaatatctttagtactataccatctttcaacgaggctcatgtggatcacaggatcacagccatatgcatctgacgttgattttgggcatttcgcaacaggtgccgcacatacatacgaacgtacgccaggcgacatttgttgatgacctgagatctccggtgatgtcggcatggaatccggccaacgagtgttggattggctctcgtttgtcgtcgtcgtcgtagccggatttggggaccaaagggttctttgttttcaggtccaaattgttcttctggccaacttgtgaaaatttcgttggatcagtaatcatccactggccactactgttgctgctaagtgcgaattcttgtccactcctttttgaagctagtaccggagtagcatggcactgtgtgatagtagtacactaggtagtactatgaatgaatggtgattgatgaatatctatgatatgctacagttcagaaacaagttggtgattctgaagttaggattgcagatttgcagtaacatcttgctgcgtgtaaagtcttgaaagggttggtttctcactagggcaggctggctcgagaaggtaggtttgtattctgcaaattaattaaagccgggagtaggttcatgtacccattattatctttattaagaaaaggttcgtgtacccaccggcaggtatctcgaagaacaaatcggttatgctgtgttgatttgattgttgtttaccgaaatgggacgagaaaatgacgtggaattaggtcctcttaaccaaagccaaactgatcagatattcacttggggggcggtgcacctttaacacttcgtcacatccactcgtcaggattaggagataatagcagacgacgattggcaagccatgcgtgcagcggctgatgcagttttgacaattctaaaggtaagctgcatcgatcgatcgcctttgcaagttgatatttcagaaccgatcgagacggccggcagggcatgcatccatcgatcgctcgatcgatcgcagcgaaacggcgtgcattgcgtcggatggaaaagctatggtgagtgacaggcgacggcgacggcgacggccgagatcgatccgtccatccatccattgaccacggtgtgcctttcctttcggtcgccgtcgcctcgcctcgcttgatcgactgattctacagcgccatccaccatgagacccgactcggtactgagttacagaccgaacagttcaactgagactctttaaattgtaggaacgaaaaagcaaaggaatataaaaaacataggattataattagactgtagaaaaaacacatgaattcgagaagagataaaatattcaaagaaaacttcccatgtaaacttgcatgtaataaggtcacgtagaaatttcataggattcattcatttgattcaaatgtttatatatatgaaaaaattctatagaaataaaatactttaaaatttctataatttttgttcgaatcaaaggaagcctaaaaacagcttaagctagtagtaagaaaagatgggacaattcagttgtactcgatgataaagcgaacaccaaatccgaatataatctcggggggaaaaccggtgcacgtcacgctgcccgtgccaaccatctgtttacctacctctttctctctcttcctctctctagttcgatcattcgtttcggtgatggcgactgggtttgcgttgcgaatgcaaagctctccgattcaaacagtgtcatgataacctgataaccgcgtaggacatggatcgatggggacgacgaggacgacggctacgctgctatgatatgctggatagcaaagaacgtttctttctttgcctttggtgcggaatctcctgcagcggcatggtgacgtgaacctgattttagctgctgaatttgggagattttggattcgatcgatcgatcggctacgagcggccatggctgcattgagggggttaagggttcagagtaagaatcaatcacaagttgggttgctagagttgaccgacgcaaaatactttacgagattattgccatgaggaataaggtggactgacgtgcaagcatatttgcagtttgcagtcagtaatgtacagtttttcctttttctttcagtttttactttgtacttaaacttcttttatcaatatagcgtaaagcaatcttgtttggccgttgaaaaaaaaggagaagggttcagagtgaggtcagagacgaatttatttcatttttaatttttttcttttaatatttacagaaataatctattggcacaaaaaattacaaaaatagaccctgccgctctaatggagggcggcaagctaacgtggcagacggcggctcgacggcgccgtctgccgccgtctgcgaaaattgcatttagccccttgccgctctctgtaagggcggcaaggggctaaatgcaattttcacagccctaaagagcatttggctggtactttttgcatctaggccccttgccgtcttattagagggcggcaagggacccagatgtaaaaagtaccagccaaaaagtactaggctcgggctggcttttttgcatgggggccagagggcggcaagggttttcgtgcaaaaaaaaccctccctctcccgtctgccgtcaccgcccgtccctcccccgtttgccacgtcagcttgccgccctagtggagggcggcaggggtctatttttgtaattttttgcgccgatggattatttctgtaaatattaaaagaaaaaaattaaaaatgaaaaaaattcgtcagagaccgaggttctctttgtcactgggaagagtagcatcaggatcttgggctcagatatgagcaaggaagaaagtgaggtgctttttgtagccgaacaggggtgccgatggaacctcaaggttgctcggctgcttcgtttgggcctaggcattaagcaggccggagttatcagccagcgtaatttgctcagcccgtcagaaaattacggttttcagctttgagaaaattccatccatgccatgaagattttggccaaaatcaaagaacaccaaaatcctgttatttgcgcttcacacaagaaaacgtgctaatgaaaactttcctcttcactgtgttcctaatttcctatagctgaatctgcatacctgaagaaaaacacaacactatggctgaatctacataactaaaggaaaagacaaaacaaactgaaagtgtgtatctgttcagattctaatactaagatatatcatatcatgtattaagtttatttattttaggatggatagtgttttaaaattatgccatgatcttaccagtaataatcacaaaagagaagttatttaatccgaaagttggtactacagaaaccacatcaactgcaagcaaagggaatgctccggcaaagtcttgcaacagaaaatgcttaccgacaaaaaattttcgaagaattcactatttgcacaaaacatgaatatccccaaaacaacataccgatattggcaatacccagaaatccatccagccaacaatcatggtagcatgaaataattagaacttgtgaaaaaacagaacacggaatttatatgtatcccgtgtctcagtatttcagccagataggcagatacatcttaaagacttggtacagtaccagaaaatgtaaggtcagccagacacatcgagacttcataaagcaccacaaaatataagggatatggaatgatgataagttaagcttacagatccatccacaaatagataaacaacaagcataatcacaggatctaaacaggtacactccttaagatgccccttggaagtagacgttgcattaagacaactcagacatcaagtcctctcatcaagaagttgatattctcaacagaataccctccagataacatttggaatgcatggagaaacttctgaacaaaacatgcagatctaatacctcaacgacctctttcaaagttaatgcgggacctcccagatcctccaccctcgtaatcatctctcattgaggatccaccacttgccctcatggctcctccgcttccaatcttctcaacagctttcttccccttcttcacttcagtcaagaactgatcaagaccgaagggatcattctcctcctgtttatcaaactccacaggtctgtctctctttccagacctctctgaagcaccagaaaatcctttgtctggtttgaacctatctgtcttcataaccttctccagttgttcatctgcatcgccatacacatcagaatcaccgtccttcttaggcctgtaaagtgtggatagcgttggctgcgctgtgaagagacccttggagtagatgttatactgatcatctgtagcaaacccagagtccattcctttatcctggttgaacaacctctggtcatacatgacttccccacctttagcaccgccagtgcttgccatgcccagggcaatcttctcactgacatcacgatccctgtctctagtgagcttactcttcttgcccattgcagcatccctggcctccagcctcctctctctctccctctcacgtctcctctcctcacgaatcctgtcacgctcaatccttgcttccctttcttctctactctcccttcgttgctcacgaggctgctccaaatccatatcttcctccctgtcatcaacagcacctctaccaccaccagcaggaacccctgtaggtgcaggtggggcaccagtcctctccatgcgcgccttctgtgcaagtgcccttagctcttgctccttcctctccttctccttcagctgcagctccctctgcaccttggatcgcatctgtactgcctccctggccttctgctccgccacatacagtgcttcagagagctttgcaaagttatcattaatttgaacctcctgcagcccccttccatcagctgccaacctcttgtcgagtggtatggtgtaaccctttggatttttccaatttgaaatgcatggtggaatcttccaatcttgctggtccttcactgtcactggccgtggtggcgagtgcatcactgggacaggcggtgatccagaagcgcggggcactcgcttatgcttgaatttcggtggctcaagaggatcctgagccatctctgacatcctaataatcctctccttggcacctgaattgaaggctgccgattgctgcgatggcttatacttgataaactttgactctgaatcatgcgtcggcacattcttgggctgtgcggcggagagccgaacattgacaaccttctccaaggcagctttagttcgttcagtggtttcttcgatctgtttctggtactcctcgtcgtccgcggttgcctcggaatcagccgtggcaatcttgggcacgaggtcgctgtgctttgagtaaacgatcttagaggcgttctcaccctgcttcacgacggcgtcgaaggcgacgctgcccttggcgtcgacggtgagcgcgaggatcttcgagccgcccttctcgtcgcgccggcccatgccgagcgggtactgcgcgacgtggatctccgggaaggcgccgccgtccccgaagtcctccggccgccgcggcacgaacccgccacgcttcccgtacggcggcacgggcttggcggggcccgaaggcttcgccgccgccgccgccgcgtcggattgcgccgactccccgccataccgctccttgaaccacgggtcgctgctgtggtcgtagaacgtcgacgccgccgccttgggcgtcgggaggagctccttgagggacgccatggctagcacggcggcaagccgcgcgggatctagggctagggttccggcgagtcgctgggtgggggatcgggaatcgaagaggaaaagctagggtttggttcgattcgtgtaattatttgggcaacgcgataagagaagctgaccacggtggccggtggggttatggcggctaccggatgggctaggcccgataagaatttgggctgggccgataaatatgcaccaaatccttagccaatccgaagcaaataccatcgtgtctgagacttctagtccgaaacaaaataattccttgggctggaaactattaatactggtgatgatgataactgggttgaatcctgagaggataggaaagaggggattgagaagatacgcaaaataaggtgaggtgagccattagtgtattattaattgagtattaactattgtaagttttaaaaatagattaatatgattttttaaaacaacttttcaaaagaatttttttttgccaaaaacgcatcgtttagtagtttgggaagtgtgcgcgtagaaaagtagatgttttctcctcaatctcccagcaatctctcctgctcgaacggagccatgcttgtctgcacgggtaatggctactccctccgtctcataaaaaaccaacatagtacttcctagtacaataaatctggacatacatatgtccagattcgttctactaggatatgtcacattctatattttagatttatttttttttggacggagtgagtaacgagtaacgaggctacggtattaacggctcggaatgtttgcctgtttgtttaacgagaataaatgagactgacaagtgggcccattaatttcgcttgctaacacgagtttaatctgccaatttgggctccacatgacacacattgtcaccacccagccaggcccacgcgcgtggtcggtgaaaatgctaggcctacttactgtgccagcccaaattatcctactaagtacaacgtaaggaagcgggctggagaccggacggaatggtatacctgcagtactgggccttctcaaaggccgtgttaccagccgacaaaatttttggtccactagaaaatgttaccccaaatgttaatgtattatcccaggaaaaagagaaagtgcctatgtaatgtgtcagttctatggttggctagcgaatgaaaatctgccgtactaaaataaatagaaaatattttatggacttggaaaaaatggtggcgtggaagtacccagacaactcgatctaaatgggcagcacatactactccacatgtactacggacactatcaatttgtttgtattttaacaggccaaaatcttctagaatacgaattatgctacagttaaattgcatggtacaggactacagttacagggagtataattgtaccagaaaaagaagaatgaaaatgaaagtagatccatccaaagaatgcgaaaccacaccacacacacaggtggtactcagagaaaaggagcgagcaaaagagaaagcgccacatgtcaccctccaaaagcacaaacaaaaaatcagggtgtgtgaaaaaagagaagaaaaagaaaaagaaaagaaaaattcggacagcatcagcacaagtagtagtagtgcacagctcactcgcacagtctcactgagccactagcccaccaccaccctcatcctcctcccagctcacaaaaacctcaaacccccagccttctcgggcctccacagaaagccgaggaagagaaaaaaaaaatggagctcttcgtctccaccgtcgcctccgcgcgcgccaccgcccccttatgcttcgcctcctccttccaccaccgccgcgctgctcctcccgccgtcgccgccgccgccaccctccgccgcagcaaccgccacctcccgactcgaggtgcccgaacgcgccacgattttttttgattgattgattgattatctttctgacggttttgctgttggtgatggttgtcgccaggatggcggtgcgcgagcgcggcggcgccggacccggtgccatcggaggagcccgcgtcggcgtcggcgtccaccgtcgtcgtcacggaggacaagcccgatccgccgccggcggaggagaagagcgaggaggtcgcggcggtctctaatggcgggtctctggagaccgtggcggcggcgccggtgtcgtcgggggcagccgaggaggacggcggcttggatgacatcctcagcaaggtattgcctcgttgtacctgttgatgtttctgaattgatcgccaattctgacatatcaatgcccaattacctgttgctgtcaaatgattgagaggagagacgagttgaagaatattgcatacagaagtatggtgaagaatccaatgacaaatgcatacttgatagatctcaaaatgtaaaattgagttcagtcaccgactcgtgtaccaaaatgtgagagtttgtgagctgggtgattaggacctagcatgaggtttgcagagacagagctctaaaccccaacacatgatagacagaaacaaatgccatatgccatagttttcttgctatggattgaagtttgattgtttcatgtatagcgtaccacattgttttttttccttctatttctgttaactcagaagcgagtgtatgtatcaccataatctcatctttcctgcatccatttccatatattcagcttgcctgttcttgtgtttgctatacgggatgaggcattgaaacgcctttgctgtactgcatttagtactgttgctcacacaaattttttaatcgttcatttcagctggacatccaagtgacaccaactcttgtcctctatggatccggtgctttggttgtcctatgggttctatcttcagttgtttctgcaatcgattccattcccttggtatgtagatatgacatttttcaccaaatatgtagatatgacattgtttacaaatttgtatgtatcgaaaatagttaaaatctgtcttcaaaccgctcctggtatatacgcctagttgtccattatctgaaaaatgtagtcctagttgtccagtatctgaaaaatgtagttctagttgtcagcagtagtagggttgatatagttttgtcgtacttattacttgaagagtttacactgtacttcctaaaccgcttgatcatctcattgcaggttccaaaagttcttgaactcataggaactggttactcaatttggttcacttcacggtacctcctcttcaaggtacattttcaactccctacaaagcaagcgccagtcattcctgttgtgtgatcctaagatcattttatcatatatgcaggaaagcagggacaaactgtttgcgaaattcgaagatctgaaagagaggattatttgagctcacgatgaatgatcctatggtgtatgttaggcttcgcagccaacttattattaggtcttcttttttctattactgaaagggaaaaaagttgtgtatgtaagccacgtttctttcgcttcaaatatgatcagacatccatagatttttgtttgttagagcggagcttgctcaagtctttctggtttttttaccacttgatccgatgtatatactccatactgaaagtgccgccaactgtgaagctgtgtaccttggatacataataatatatcaaatgggtcgaccttcatatttggtaaattgcttcagcacataactgtccgtcccttttgttgtaaagaactattgagttttgacacattgaaaattgagtgggagaagcagtgtcaccaacagatcagctgatattttccctaattcccttccgaccactttccatttgtcaaaacactgtagtttgaaaaacattggaagaaatatattgtatatatactaagcaagtagcatagagaactttttagacaaatcacaaatcctaaatcctatctctggcaaatcgctacatctgtagttgcatcagtgcgaaatgcagataccgttatgtgaagtacttatatttcccctttaaaggcaatataaaacttgccaggtaagtctttaaccgagttattttccccctgccattcagctgcgctcaataacatcagtaactaacaagatattttgaagtgcgtgctggcatttcatatggtatgttagtatgttacacaaaggggcgacatgtatgtgtaacttagaactcttgcttcgtgcaatctacaacaactgatcaccaaataagaatcatctatgttgtaggataccaggatgaactcagcgtcatcatttcctcccaaaagtggcaggtccgcatgaccgtgctacattttgcagattacatgagattttacaatgacacacaccatccaaagacagcagatggatgcagactgtagtacccctgagtaagatcaccatactgaatgccttatgccaaggccattgcaagtaaggattaaacctttgtgccggttcagatagtcctgaaagagttatgaaaaatcagaagtgtcttgtgcaacatagattttctttcagtgtgtgtgtgtgtgttgggtgggggtaggagggcggggacttaccactacattatgatcttgaacataaagaatgcctttcttgtcatactctcgccttttggctggattactgagcactgtgaaaaacagttatggtatcatgaatgagacctgatatatcaaactgaagaacactctttacaatgggaaagattagttacgaaaagatgccctgtcagtgagcacagatagtaacaccaatgcatataaatttataaagctacgtgaatgtatccaagatgttcaaggtgcaccataaatgtggctcaagtgtgacaacgaactaagatcatgtttcacataatttcttagcaatgattcaatcacagagctagcctgactatagattatctgagcatttttgtgttaagcaatgagcaatttctcctgttcgaagtgcattagtctccagaagatttgacaatctacttgacaagaatacgaggaagctatctccaactgaatgccgagagaaattggattgtttaattaagcacaacccagattcctagtaactactaatccattgtaaatgaggaaacacacgaatcattggcacctaaacaatttgaaagaacagccaaacatcctttagtcttgtggtagcaattccttgtatttaaattcaagaataacatcttggtctcttggacatagatgacatcaattgttccatgtctaggcatctcaggagtaatagttatgaaattcactaatacagataaatctgcatgcaaccgaacattaatatctattttgatttgctgctggcaacttattatgttagcaagagaccaaaaaaacaaaggtaaactgcagtacggcacatactattttcacattgaagttaacatagacatagacgtatcagatcaattaaacaacttcattgctcaccttggtatgcttcattaatctcctgaaatctggaggttgcattttcttcgccctgcttcttgtcagggtgccacttctgaatgaagagagtggacatcattaggcaggcattggtgtaaaccatcacaaaagtggaatccctagacttgacgagataattcataggacaattcaagaatgtgaagcacaaaagtggaattaggccaaactttacttgacgagataattcacaggacgattcaagaatgtgaagcacaaatacagcaccgtgttagagcaaacactgaccagtgcaagacgtatatagctcgacctgatcgcctcttccgacgcatcatatcccacttccagaatcttgtagtaatcctgcattcacgaatcggggtccctgagccaattcccaattgggtaaaaggaaacagcacaatcgcaaccagcgggcggcattccatctacaagatccgctccccccaacacaaaaacagcaatcatctatcgcaatccaaacgcccgtgagggttaactcaggtcatgaacaaacgtgccacagaaaaaaaaaagatcgcggcggagaaatcgaaggagaagagacgagacgaggcgtgggcgtggcgattcccaccttgggcttgcagaggagggagatgaagtcgaagtcgacggggacctcctcccccggccgcgccgcctcctcgccgtcctcctcccactcccaccacattcccctcccctctcgccgcgccgcttcgacgcagcgcgcacccgggatttctcggcccgattcgtgcccggagaatcgcgccgattccggcgattctcccgtcccgtgagatggctggcggtagttggatttcgtgggcttcgacgaagccaggaaggttctagtagtagatttttctgatttttttgggggggattttctggtcgagtaatggaccacaatttgacacgcccgacgtggcttcgcctgtggttgcacttgaggcccaggcccatgtacaacgtattcgtgttttggatgggctttgaaatccattttgtttgtctcggcccataggatgaactgacacagatcaccaattcaccatccacctgggacgaaaatctcaccaactccctcgtcacttgggcagctacaagtacagtagtactactctacaaaggaattttccatgtaaaatactcgatgagaggacattagcaaagtgcacgaacgatgcttactcgacaattggaatcattacacggcacgatcacattccgctattattccgcccccggttcgaaataaagttgggtttagctctacacacgtcgaaaataatattagctcacaccaaaagtgatccacgccgaaactcggatccagccggcgtgaagcatccatccacgcaaaacgggaatcggtttcgtttcagcaaatcccgcactgctaagcaaataagcctcaggtcccatggcaacatggcattttgccgtgttacacgggagaagaaacgctttgcactaccacttgctattaacaaaaaaaaacagctcactacaatcgacatatcagagctgactgacattccgtagtgtcgaaggaagcagatcgagtaaacgaaggagaaaatgcttcaggtccacgtgcagtttcacactgctcagtaaacgaggaacattaacgagtactcctacgtaaggccattcccaatctaaacgtatagtttctataaactccatatcattaagaaactactactagacacaactattctaatgcaaacatcactatttcatacttaaatttaatgttatttatctcacatgatgttttgatatcgtgtagaaaccatgtcttgagacatagttttcttctctttcctcatttattcagttgtcatatcattttttattataggtggcagcttatttaatactatacacatcatctagtcattgcattgggaatggcctaatactgtgtttccaggtttgcccctgaacgttcaccgttatgatccggacgcaacctttacgtgttgggtggggtgcagctctcgcgctcgcgcgcaacgctttccgtgtgaaatctcatcagtcgggcgggccggggtgccccgtcgatttctcgtccaacccgaccaaaccgctcccctttccgcgcgatcggccacgctgcaaaagccaaaaaggtacgtaattggctcaagcttggaagacacctacgtacaatttcgacatcggtgaaaagctcatgacgacgacgacctgcagatgacgaggagccaaggaaatgctggggtcgggtggatcggtagtgtcggtggagcgttcttgatattgttttgtacaggttagcgttttatgttcatactcgatgcatgaattgcttctagtacctgaattttggagtagagaagttcacgcggaacaacttcagttgaatttaaccatctgtttattactttattagtggatgaaaatgctggggttgcattaacacatgatcgctttgcggaattatagattaacaaatgcatgaaaaattcacgttacaaacaatcaacagctatgtttcagctcaggcaggaacaaaatggcaatccctaccatcattagcagccagcaagggcctagttgtgtgttactgttagggcctctttgaatcaaaggatttatatagaaatttcataggattcaaatcctataggaaattttcctatttggccctttgattcaaaggatcgaagctttccaaatcctataaaattcatatgaaacggcacattgtatgtagattttggagaaaatttagcaagagctccaacctcttggaaaatttccttttagtctatctctctcatccgattcctgcatttttcctgcgctccaatcaaacgaccattcctatgtttttcttgtgttttacaatcctttgttttacgcttcaaatcctgtcagaatcctgtgttttttctactccttcgtttttttttttcccctgctgcgccaaccgggccccacaccgcctcacacccatccagcacaatacagactgcaccgaaagctactagtagcagcatcagtgtcactccatcagtggcacgagcccattagccgagtgtaattcccccgaaaagccaggggcatcaccgtcctttcacccgcggcagccggaatattatagccacgccgctggagaaaaagaccccgacacgtgggccccacctacccatgtgcccccaccctccgtcacatgcgccgccccacacaacaccgcgcgccccttcatcccgctcccgatgcgcgccacgtgtccctacggagcatcgaacggtacagattcccctcgggcgggcgagcgcgttcccaccggtccaccccgccacggcgccaccacgtcggccgcccactacgacgtttcgaccgttacggggccccaccacggccggagtaacggcgcgccccgtgacggcgtcaacgcgcgcccgggcgtcgcggcctccctcccgttgtggctgacgtgcggagaaggttcaaacgaaacggaaagcgagagtccaacctaaacgttggaccgtgttaatgaattcaccgatgggtccctctgccgcacgagaattaccgccaaataatttaccgtaacttcggaaggttactgcaagcaccgcacgagatatgatttaccgtatcaaaggatgatttttttttctccttgctaagcaaacgctgggttatttctgcaaagaggaaggaaatcgagaaaatttctgaaacgcgttgaagagatcttccattaatttcttaccaaacgaggaaccagacgagggctaacatgtaaattaccctgccttttttccgttaattcgaaaatttacagtgggttttcctttcttctcccacactgacccaagcctaaactcttcgttgtccctttccttctcctcttcccctcttccctaccacctcactcgggctctcttccgggctccggtcgctgtcgcctccgctagccgctgggtggaattgtttgcgtggattttttttcgaattaattcaaaccagagcggtcgtgtcgctctcagttccagcgccgaatccgcgctccggctcgggtgcaaggtaagtgggatttctctgctggatttggttcctaatcgttggaatttgctcgtcgtgcttgaatctgcgttgtgtggattttttttccccggtggtttgtgggtgtttggatcgcatgcatttggtgtgagtggcttgaaattttgttgatgatttttttctgctgaatttgttcgtccgtttcagttggaactcgcatgcgctgatgatgttcacggaggggctagatcgagacgccctcaagtgggttcgtgaggtgagagttcgagctcgccgtgctcctcccgagccctagctggtttgctcggtgtcgcgttgggttttcgtcactgacgcgtgcttttttttttctgcgtggtggtgttggttgatgcaaaatgtggcagggccatggcggggcggtgcacagccacgaccgcatcgacgcgctccgcgcggtgcgcggcgccgggggcggcctcggcatgccgccgccggagaagttccggagcgggcacctgcctcgcgcggcggcgccgccgctgcgcaccgacgacggcagcgtcgcctcgggatccgacatggaggagtcgtcggacaccgaggaggtcgaggtgtgcagcggcagatactccgtggactcgtcgccccgccgcgaggacattctcaggcgcacggccgtgccccagtaccggtatgctacggttcccgggatgccgagttactactcgagcgattactcggatctgagctcgtcgagagacactgcactgccaaggacgaagcagcagcaggtacggcggccccaggcacaggtcggtagatatgttgaggaggaggagtactcggactcagctgggagctcggagttctccagtcaggtggagacacggagcaaaggtgtggcctcgaggggtgggtatgcatctgagtactctcataacggcccagcgcgaagagaagcgaacaatgcagttccgaaaacccggatggcagctgcagagaattacagccgcactgcacctttaaactcaagaacatatcaacaggataagtattctgcccatgtccctgctcaagacaatgtgaaatcttctcaaatggtacgtttctgcgcttacctgtaaagcatattcattttcttatcctcagcttcagtatcttatttctgtgaaagcaatagcattacttgtcatttccattttacttcattctgcggtaccatgtacaagcactcacctttcggttgagttaggaaagaaaagcctgtattgcataaagctgaaaatgtttatggtcagtagtatgtgaacccgcaccaagcaaccagctgctaaaaaaaattagcacctaaacttaaaaatgaaacagttttcttgttttgaggaatcatctgtccagaatctagattacctgatactgtttgttgcattctatatctcagaattttgttcgatagtatgtcctccacaactccatagttctctgagaaaaaaaaatatttccccccttccatgaatattttctttttcttttttttggtggggttccatgaatattttctgaagcagaattgtaatttagttcactttgattatggtctggatgattaaaaaaacaatttttgcttctggattctaaagagaaaccctctcctaggattatctgtcataaatctggaacatttgcttcctcttgagaaaagcatgtgcgctgagcaggtactgtaatcttgtatgcaaaaccgtttttaaaatgcagttttctggggaatgttttgttgtcaagttttctataaatgatccaaactagccaaaggaaatcatatatattgagaatttttatattgataagttttcagggaacaatatgtgatgtgttgattgaacatgtcgcacgatgacattgttacttttaagttgtgtaattgtgatgattgatttttatgtgcaggatggactatctgatgtacccagtgcaccgccaatacatgcttatgatcaggaaataagccaagtttctcaaaatgttgatgcaaacgtatgcgatggttcgactgtcaaaaaagaggaatataatgatgatggcttggaacctaacttgcctgagaaaagtgaaaggtagcttttgtaatacatgttatttgttaaatacttcttgagaagtttttttttgttatgtttgcatttatttctgtaaaattgttcggttatgtaggagcactttaaatcctgggcacagcagcaaaccatctagttcaattcctcttcgagtccccacgtttcatgccaggtatgtgtagtaagcaagtcataatttgttctggtgtactatgctcactactaacacatttcttaaaaaaattatccaagtttgcaagggccctggtattctgttcttgcttatgatgcttgtgttcgcttgtgccttcatgcatgggctagaggttgcatggaagctcctgtttttctggaaaatgaatgcacacttctgcgaaatacattttggtgagttattttttatgcatgaacaatgctttctgctcataaaatatgacagtatgtaaaatgccattaactactgtagctgtctatgtttgctggctttatacctgcctattctgaacctgaggtgaacagtgctttaagtttctgtctgcaattgccaattcttgtactttgaaaaatctttaaataaattcctcagatacaaaatttatctattcattctagttttacttgactgctgtggttgttcctgtccattgatttgctacagttggaaatatttatggatcttgagtaaattgttattgtactttcctttttttaaaatggatactttagaagtcaaaactgatagaaagtgtttggatctagcctcttgtaaacataacctaaacatttgttatccatgtgctaaactgctaatgcacattcatgctgatagtgcttaaatatttgtttcactccatccttagtgcataaacagtaatacaatcttaagttgatattcttgtttattttttagcctgcaaaatgtgcttctacaatcagaagaagagctcatggcaaaacggacatctgagcttgttagcgatggagttgcatccaaacccaagaaaacaattggcaagatgaaggttcaaggtatggaaacccaacactggctattttcccctactgtttatgaaaactacttatatccacatcttcatagctaccattaccagaatattgatttgcattgtcattgttgcatgcaaaggaatgccaagatgatagtgctaacttagttaatatttccaattgcagtgcggaaagtccggatgtctgtagatgtaccatctggttgcaatttctcatcattgccgatggtgaaactaaattcagttcggtaccgtttgtcaaatgtacaatccacactctcctctggatgggagtcggttcgaaggatccaaactttaccacagctacctgctaacagttccttttcaaaacatagcttagcgtacatgcaagcaagtgctcagtacatcaagcaggtatctggtgtgctaaaagttggcgtgactaccctgcgcaacagctcatcctatgaaacaccgcaaggtatatatggatcacttctcttttaacattgagttccctaactgaatccatcatgtcctttttgcctcagagacttactcttgccaattgaggcttaaaagtacacctgaagatgatgttgtaccgatgcagccaggatctggtgaaacacatgtcttgtatgtagcaagacctttctttgagcacatatatcattgttttgcctggaaatctgaatattatgagattagtgaggctgaatatttttatgtaaatatttcagcttcccggatagccttggagatgatttgatcattgatgtttctgattcaaaaggaaagccctgtggacgtgttgttgctcaagttgctacaatggcagaggaatctgtatgattttccaaaccaacttgctactctctgtttaagttctttaaatagaagttattgtagattttcatacttgctctaaatggttattgtacaatctatgacttcttcaaaatccttgttccttacagtatttctcaactttcttgtgtagactgacaagcttcgttggtggtcaatataccgggaacctgagcatgaactcgtaggccgcatacagctatacatacactacacaactgctgcagatgagaacaacacgaaggtactgattcagtgttctgcaaattcaggtcttatcatcttaggatgttatgtattcatgtgaatttaatttatttgatacctgttaattgcagcactgtaacctattgctcatttctcccccacactccttttgctagctgtcgatttactgaacaccttaaatgacacggatgattttcatggatggcattttttaccatttgattgtttcctgtataacatggaaacaacagtatatcaatcattgatcaacttacttatattttcctgtcatggttgtcacttaaaaaaaagagtgtaaaacagcctttatcatgtatttagactgtagactttgttcttgccagacatatcatgattcgactgaagttttcttttatttatgttactatgaattccagcatgtcagcaaaggaaatgtttcctaaatcttcattctgatggaataacatgaaacaagagtgattttacattgtagatttgaatttgtctgaacagggtagtctgtttatcaggatctaagtcatataaacatgatttaaaagtatacctttctttcgtagctgcctgattcgaaatggcctatccattttgagattaaaaatgtgctctattgagtggaagggatacttgactaattgacatctatttaattttcatggccgtgattttctttgcagtatggctctgttgcagaaactgtggcttatgatattgttttggaagttgcaatgaaagcacagcacattcaacaacggaatctcatcttgcatggttcctggaaatggttgttgacagaatttgcattgtactatggcgtttcagatgcctacacaaagctgaggtatttggctattactataggaccaataaccatcacttttacttaggctgcgttcgtgagcatgggttgggaaccctccctcccatgcacgcaaaacgaagcgactgtttaatgcatgattaattaagtattagctaaaaaaacttgaaaaatggattaatatggttttttaaaacaactttcatatagatttttttttggcaaaaaacacaccgtttagcagtttgaaaagcgtgcgcgcgtaaaacgagggaggtgagttgggaaagttggggaaagaactcagccttagcatatagttgttggcatgacgttgtgacttaacttgcttaagtcttgccatatgttcccttttcttgatctgtctagatgcaagaaatatttacaatacctgatgagattatttaagtctgactcacaaggctgttctagcagttgattagaacctttaaatttttctatcatatcataattttttttcaaatatctgtcatcttccctcatttcctttcctttgctattgctgagtgctagcccttgactccttgttcaggtatctctcttatatcatggatgttgcaacccctactgctgattggctcaatctggttcatgaccttttgttacccgtactaatgaagacccaaggcactgctgcattgagccatcaagaggtactgttcttttcttcagatatttcccctggaacagcaagttctgttgcacatctgatagcaaatgccatgatttaatgttaatgctatatagtatattatccaagaaattcccttccttacacccaataatgtgtgggagctttcagcactgggtgtacccttgtttgtgttgatgttatgttatccttgtgtgcaatagcagtactgcacctatatgctaactgtttacaaatgaatgtgtattttatatgttctaatattaaaagaaatgctagaataattatcttcagatgtaaaactaaagaaatttgtatcaaccgactatctatatgtaagcacatatacggtatggaattattttaaatcttacaaatggtacacaattgtatacatgtatcaatctatagaagatcaccatagagcacaccaacaccatcaccaactcttcttatgttgtagagataacaggcaaattaatctagttacgtggaataaattatattatgctttattggcttattttgttttttctttctgaaattgcttatgtaacattaacatcttaactgtgctgcttcactggaattgtatcatcagaaccgcatattaggtgaagttgaggagcaaattgagcaaactttagcgatggtatttgagaattacaagtctctgaatgaatctttgccgtcgggtttagtggaagattttagacctccaactggtttggctgcttgtgctctagaaccagctataaagctttacagtcttctccatgatgtattatctccagaggctcaactcagattatgcggttatttccaggtcattcttcaactgttttatatctcgatatttatcttctatagccagaactctgtagcttgatttattcaaaaatatgtccaggctgctgccaggaaacgatcaagacgatacatgcttgagactgatgaatatgtagcaggaaattccgaaggcataagagtggatctggtgacctttacaacagcttaccagaagatgaaatcattatgctgtaatctacgtaatgaaatctttacagacattgaaattcataaccagcacatacttcccaggtattgtgattgtattgcaacatctgttctaggctagtatattaccatgtactgttattcattacttactttgtatgcatagtttcattgtagagtatttagacgcgttgactattctactgattatattgcttttgctattgtttctatttttttctatcaatcatttcaattttatgtttgtccctctgcttctacagttttgttgacctccccaatttagctgcgtccatctatagtgtggaactctcaaatagactgcgtgcttttcttgtggcatgccctccaactggcccttcatcacctgttgctgatttggtgattgcaactgctgactttcagaaggaccttgctagctggaatatatggtaaaaaagaattcttatgtgtttgctaggttctcttctttctcatgccttgtctaggcaagactgaatttgaatttctgcacagcccaattaaagccggtgttgacgcaaaagagctatttcatttgtacattgtcttatggatcgaagacaagcgcaggacgttgctggaaaattgcaggatggataaggtaggttctgctctttcttttgctcctgttcattgttgatctatgatatgtttggttagcacaggttcttcatatgacaaataccatttgctattggtactgtgttgcctcagtgttaatccagtatttatctttgcttttattctccatttgtgtaacattggagaggttatatgtaggtactgtgccctggcagctactaaaatagtttgtccacccaggttttcagtcaatatattttgtaattgtatctcattatgcatcaccttctccaattatatcaggttaaatggtcaggagttaggactcagcatatgaccacaccttttgtggacgagatgtatgatttgctgaagaatacattgacagagtacgaggttatcatttgccgatggccagaatacatatttgttcttgagaatgtaagtttgtatcattcatgggacctttattgaactgttgcacagcaaagaaatccaacttaacatgtgctatttccttgctttacaataaaaggctattgcggatattgagaaagcagtgatagagtctcttgaaaaacagtacggggatgttttggctccacttaaggattgtattgccccaaagaaatttggtctcaaatatgtgcagaaactcacgaagcgcaattcagttggcccctatactgtacctgaagatgtaagttttgttgttgaactgttggtccacatttatttgaatttcaagtcttactatttgaccccttatttgctttcagctgggcattctcctgaatacaatgaaaagactattagatgttttgcggccaaggattgagagtcatctgaagtcatggagttcttgtatgcctaatggaggaaactctgcagctattggggagagacttagtgaagttacggtaacactgagggccaaattccgaaactacatgcaagctgttgtggagaagctctcagaaaatgtgagtgtattgcgacattttatgcagttttaccttttcaaacgctgacttatttgcagtcattttagagagagctcgcaacccagtcaccctggacacaaatagattttaatgtcataactgatccattatgctactttgatctggagtcatttaaaaaagacactttttagggaatttagtcttgattatcagtaatgctgctttgactaatagcactcaattttctgttctatatgtagcaatttagcagtcaattcaactgcggagacagttgctttgttgacacctttgatggatgatgtgttgttaagtttgttgaaaaatattgtattcttatcttctgttttttttttgaagactcgcatgcaaaatactacaaagctcaagaagatcattcaggattcaaaagaattggtgatggagtcagatattcgaagcaggatgcaagcgttgaaggaccaacttgttgaggcaataaatcatgtacacaaggtcactgaagtccatgtgtttgtagctatatgccgaggtttttgggaccgaatgggacaggtatgaatagaagtacccttcatatttttctctttgtcatacatgttactaatcaacctggttttaggatgtcttgagtttcctggagaatcgcaaagaaaacagagcctggtacaaaggcgcacgtgttgcagtatctgtaagtttatgctcctacagtccccatgtcaccctgcttgccagtgacggcctatttatttagttctccattgttgatgctcctcctttctgctatgattaaataaacatgcaacattgcaggtgctggatgatacatttgcatcccagatgcagcagctgctgggtaattcgatccaacagaaggagctggaaccacctagatccatcatggaagttcggtcgatcctctgcaaagatgcaccccgacagaagaactctagcttctattactgagcatttttggtgtacataccagtcactggaagaataaggacgtgttgacatgctgcggaagatgcaaagtgaagatgtgggaatctatgtaaaggaaaaatgtgaaaaatataaagatataagtacaacaaaaaaacaaggctacagaagggtcccattgaagacttgaagtgcatgaccggagaagatggcctaccagataagtccatcaaatgatactttgctggttaaacctggttcaagtatgcttctgctgcctgtgggatggtctgcattgaaaaattggactgcactgtaggtagtgtagtttaagtgatgctttaggttagatcatcgatagcatctatctgtgctcacacaattgccaatgttagtgtttcgaggtcgatgactcgttgatagaaattattttcttctaatgtatggacgggacaattgattgttcgtgacggcttgtatagtatagtaatggtggtcgagctagtgaaaggcaaagctacatgccactatgctagagattctggcgaagttcatggagtatgttttcgggctgattccaaaatgttttgataggtgctcagcgtcatatatttctcctgccttaatggttgagctaattattactctcttatattataagctttgattttattcctaaacaaatttaaaaagtttataaccaaaattatagaaaggcataattacattttcaacacaatgtactatcagaatatattcaatattacatttagtgaaactaatttggtttgattttattcctaaacaaatttaaaaagtttataaccaaaattatagaaaggcataattacattttcaacacaaaatgtactatcacaatatattcaacattacatttagtgaaactaatttggtgttatagatgtatatttttttttgtaaatttgatcaaatctaaaaaagttttgagtttggctaggaaacaaagtgagcacataccaagaaaaataaacagagcaactaaaaatattgatttctgtaacttttcgccgtttgaaagccaaggctttgatgcaaaaccacctagtttaatttaaagttagtttaaatattcaaaatttggctgcatcagtacgaaataaactattttggataagtttggaatgaactgccaattagaggcgtcaccggttgagcatcaccagttcaccaccacacggccttctgcttacctgaacatatcatgccagtatgccacattgccactgccgtctcagtcaaagtaatgcaacaaggtaacggcatgaaacttgttataacaaagagacgacgaattcagcaaaagtaatacgaaaatgtacggcccgaaacttattatcgtgtccatagacgatggtgtaacgttacttggtcaataacatagaacattccagcggtagcacgcagcagtgttgtgacgttacaattatttcagtactcatggaattttagatccatccggaattacatgatgcgtttactgggcgctaagaacctcaatctcgaacaccagcactgagtttggtcgaattccccaggccggaaacccactagctccatacgcataatccggggtgcactgcaacaagaacaatcagaatgccaggtgccagaaagcaaagcaaatataacaatagtatgatatacagacggattctcaggaaataggtacagcttgacattttgcaaaggtaaaaaagccctttagttcaagctcatttgaacacttcggcatttaagcacttcaaagcaacaggaaattttacagtagatgccgaataaatcagcaaaggatttatcgcgctaaaacaaacttgcagacacatagacgctaaaacaaaccagaaacaaacttgcagacattaatttagacacgtgtgaaacccaagcgctgcatacctgaatacgagcaacttcacccacttgcatggtcataactccctcgtcccatcctataagcaagagagtagtgttatacctcaatcgaaagagtcaacttgatttgtcaatgcttgggatgtgatatgactttgattggttcttggaaatgtatggtgaacttctaaaataatagtacaagtttatacagcaacagaaatacagtattgcagttcgaatatgccttacaccagtttatatagcaaccagaataaatcaaggatacatgagagtgtgtcatcataacgagaagacacaactggcaagttatgatcaaactaaatgcaacataaacagtgaaggcaaacagtgcacctttctagctatatcataaatctgattagataatctcaactgtacaattgaaaaaaaatcacaaacagcagtgatctcatgttcttattcatcattagtcaatgcgaggaactactttcgtgaaataaaatgaaattggcaatcgggataactagatgattaatcccttgatgagataacaactttttttttgtttccaccatgtaaccacagaatctaggaacatatgcaccgattaccaactggcagaatcattgtgtatgaattgaatagttatttgagatgagattacctttgatcaccgaaccctggcctatattgaaactgaatggctcctggcctgcgtcctttgtgctgagagaaacaaaggacacaacatcagatgaaatttctatcttgtctgaatatttttgggggaaaataactttatccaaaattacctccaagaattttgatttgtgaggtctaacgataaattttctacccataaacaacaaatacacagcattggctgaaccaacgccacgcgacgcgccatccaagttacaacagaacaagaaaagaaaaaggatagtttttgtacctccaaaacttcttagcgagatcattatctttccctgcagaaaagaaagcagcatggcaaggaaaccaagttaggcttaactactccaaaacagaaactcagaaatctatccacaaaccggacagaggtaaactagcagctgcgatttgaatctaaaccatctatccaaaagacaatcctggcatcaaacatgagatccaacaagaaatggatctgggaacgaaccaccttgttcttaccgctcaggttgattcagctaagcacacgcacggatccaagaaaagaaaaagcatgaaaggaaatgttctgggggagatagggagggaggaaagcggcgaaccgaagccggtgcagtggacggtgaccttctggcccttgacgggcttgggaccggtgccggctttcaggatcgtcttctcgaagcccatcctctcttcttcttcttcttcctctccgcttgcctctcctcccttcttctcgattggactctcctcggcggcggcgctctgtgctagtatgatcagtggtggattggtggtgccgtgcggctcgcccttatagagcgctagtagattccttttttattacaccaccaatccactacttttttttattacacgactttctggtggtgtaattgttccggcgtctcctgggccgttggatggagagacgatcttttcagtcctacggtccagcttcaatggttttcttcttttttttcgcaataaaattgcatccgacctctacgtatataggttgcgcacaaccataaaaacatgggaaaccgctcaaaaaataaaaacatgggaaagaaactggaataacataaacataacggtaaacataacggaaaatactatgcgtacgatattttgttacattcctataacgatctcgaaaaatatattttgtgtcgtcctatgaaaaacctattaaaagaaccatacaatattagtcgtgaggctacaaatgccgtattaagctgctgaccggccattgactaagggggtgatgggttggttgtctcactttaccataccacactttagtcatatcacgattatttagtcatgtgattgtttcacttcacaattatgcacactttcttactcttaagacctacccgcactttcaaatttgtaactaaacatatcacacatgcgggcgagaaatttgtaatattgggactgcaaacacgagagcttcgctgttttgacactccgagtggatgacaaatgggtccatctgtgtctataaaatgtgagcctagtgttattatagcaaaggttaatgtttgcaatgtcataattgtaaatcccccctgcgggctataaccaactatttcttagacatattacttgtctaaccttagttatgtcaaagttaggtatcaaccaaacaacccataatcttcctaataacaacatatgatgcctctcatgtaatctctcttgcttgatcgtcataacaaaagaagaaatgataattgcttatgagaaaacaaaatgtgtgttatagaatactctctccatcccataatataacaatttagtactatataatatagtgatgtatccgattcgtagtactatgatgtatcctatccagtaatagatggcaatattaataaatgatgtgcttaacctaagaaagaagtaacaaggcttgaatatgggatttttaacctcgctaaaaaaatcttgttcaaaacacactagcacgtccaacaccaatatatcgttatggtggtagaacaagtatcaacaccaatatattggtttggatcgctagtttttctttgaattttttctctaaaattaactgcaccatggtacaatacaaatatacaatgatcaatgcatgattaataacttctattgtgtaaacgcagacgctcataatacaaacacattaaaaaaacttttattgtagatgtacgcttataatgcaaacacattaaaaacacttttattgtactcttttcatactatgaatctaaactaggatatatcttatacaatcaaaatttcttatattattagacgagggagtatatgctaatctaacgatttataatattgctgattttcccgagctgttacaactccaccagaccagatactgtcgcaaaccatccatccccagtcccccactgtgcccccgaccggaccgctcgcttcccaccggaccgttccgaagccacccaacctagcgcggtaccgcccccataaacacggggacacacccggcgcgccgccgctcatcgccatccacccgcaccctcccaattcttcccacgaaaacctcccaaattccgtagccgatctctcccccccaccggcggccgccgccgatggagacctaacgccggatcgatctctcccaccggcccgaggcgggtgaggcagggcgcgtcgcctccatggagaccgagcggatccgtcacctcctcctcctcacgctccgcgcgccgcacgcccgcctcgccctcgtgggtggcaaccacaccgccgcccgcttctgcacccgctaatccccccctccctcgccggaagactcatcatcctcttcgtcttcgccaccgtctctgtgcggtatagctctctctctcgctcgctcgctcagatgccggacggctgcgtggtgatccggctcccggacccgcgcgtcctccgcgtgatcgcgcgctcggtgctcctcgccgtcgcgctgctctccctggcctggctccgcgatgccgaggcccccgccggggacgcgctccaggtggggctcctgctccgcgacctccgccgcgagggcctgctcgcccccggcgcgcgcgccgtcttcctcggcgccgccgatggagactgccaccaccaccctcccgccctcgacggcgacgacatgcgacgcatcacgccgcgggagttgctgacgacgggggacctgtccgtcgacttcgtgctggatttcggctacttcgacaaggacggcgacagggttggcctcgtcgacagggtgctcaaggatggcggcatctttgccgccccaattggctcggcgagcgagttccgcttgccgccgaactaccgcgtggtttacatccgtcggttcaccgagactttcgtcgggatcaagaagattgcccgcgtcggcggcgacaatgggattgccggcgccagaacagggatggcagcgacgactcctgctctgaaggaaggagttcttgcgttttctgctcaaacagctgacactgccctcgctgaactcaagaacttcaggaggaagctcttactgcctcacatcactggagcatcagcggctcacgcgcatcaagcgtggctaaaattgcgtcatcgtccagtgattgcagttgatttcccagcaatgtggaatgtgaataagctgcagccagcacatcctctcgtccttcaggataaggctgttcatggagcgcaacagcagcagctcaacaggagcgtgagactgaacccatctacaggatattgaaacgaagcctgaattggaacagggaaaaagctcaactgaagaagagcattcttgtccattgcaaatccaggggggtgatgctctctgcctgccaaaagaaatggttggtttgcttttttctgaagttctttatttaagttgtctgtcgtgcgtgatgattgagtttgatggtgtgctactgcttaccagtatgtgtgtatgcttcgttcgatagtctccaatttgttgttttgtattcagtggtgactggtgatctactgatctccaattgcactactgtatggtatccgtttggaatgagcattgttcgtcttgatcacctatccttgttatcacgcttgtgcttcagcatgtgcatctctgaataatgcaatcgtagcagttcggcatctggttataagatgcagtactgactactgagaagtcagaactgctgttttttactcttgcatattcaattctttgcaaatttccacgcgtataagattatgatatgaaacaaggctggaaattggaatagtttactttggacatctcaaggaacataaaagtatgacaggattcatacaaaagggaactcacttctgccaagtttgtgatgtttagcacagaacaaatacaagaatatacaaaacaatgtgctacatggcacatttatttctacaattgaacaatcaatacatatttccttgctcaaatgcacgcgacaactatcatccgtaaataccaccatgtgacaaaaagatgcacaacaaactagtctccaaatgtgaaatatgcagtaccattacggatgatagcgcagtagcaacctcagaggcttgacttaaagtgcagcaaagaatactgatcgaagatggctcaagtgcctttgattacaacaactggacagaccacattgttgatgcagtagttgctcacacttcctaagaacattctgtagaacaaaaccaactcagaatttcaatcagaaaccaaaacaagacgattcatatttgatatagaaaaaaaaggggaataaataagctgacaatcaaacaaaatcaagcaagaagtacttaaaaatcttcatgacctagatacatgaacactagatcaactgcactccataaaataggagtcagttgcgccgagcatttgaagattgtatgggtataggtatggcgagcaggccagccccccttggattttaggttcttaactaccgaagtgaagaaaagctggatcaagaaaaggaggggcactactagccctctgccccatgcatctaaccaatgtctgccttagtgtactcttagagcatcgccaagagactagccagatggctctccaagttaaaatttggctaagttgggcaaaaaatctactccaacagactagtcaaatggctctccaagccatccggctggctaaattccccacctcactagccaaagttggcaagccatccggtgtgggttccacccgtctcctctctctccccctttccccatcccgtccgtccgccactccctccctacctgccgcgaaatctgcccagctactgtcgtccatggtcgccgccgccgaatttccgtcctacgtctccgtgccgccgtccgacctgcaccgccacctcggcaagctgctcaccagtggggacggcacggacgtcactctcgaggccggcggcgagacgtacaaggcgcacaggtccgtgctcgccgcccgctcgtccgtgctcaaggcggagctcctcggcccgatggcgcagccgcggagcaccgccgccgccacgccaacgcgcatcaacgacatcgaggcgccggtgttcagggcgatgctgcacttcatatacaccgaccacctgagctcgaccatggcgaccgacggcttcgagcatctcaccacaagctgccctgccattctcaaggagctcatgtccaagcttgttgttcactgaacactgaatattcagcagaagcatattaagtaggatggtgtcaattcagagctagtgtgtgattctactctggagtgtcaaatagctagacctatgtataattatcgtcatctggttcgatctggtgctaatcccgtgtataattattatctgtcatctaggctagtttagatggtgtgatgcatcatgctcctcctctctatgtttgttttggtttgtggttgtatccagcatggacagagcagtatcggtcaaatgtatggtgatagcctgcaactgtcctcggctccgcctcctcctcaaccgggcacccgtcgtcggcaccgctgcccgccatccaccgtgctgccgccacatggggggcttggcgccgtccggagcacgacgccgcttctgccagggccgccgacgctggggagacggctcccggtgtgcctccaccgctgacgacttcacggagcccggcgaccccgaggcacgccatggtcatcctcacagcgccaccgtcgtcgtcctcacagcgccgccgtcatcgtcctcctagtgtcgcccgtcctagcgccgccgtcatcgccttccctcgccgtcgccgtcgactcgcacgggagaaagaggaagaagggggagaggaggaagaagcagtgattgacatgtagggaccctgtgtcatagactgaaaatagaggggtagatggagaggccgttggagtaaataactagtttggctagccaaatcagatgaaaagttggctatatgggtgtttggagagttcgatttggagaggtcgttggagatgctcttatggccatcatctacttaggctgcagaagtagggttggctactgtgagaaacttccatgtcgaagcataaccaagtccaaactagtagcaaaattaaatgacccaatgcaagctaatggttccactccctgctcactgaatgcttcacttgtgttgtcagtattcacttttatgaaaaaaaatgctggtgccacttgacaaacaacgagattgcttagctgtcttacagggtttgtgtcaggttccagaaatcatctcttgattaggctaggaataagaataggagtatcaaataagcaagacacatagaacgattcgcaaatactacagaatgttttatttttccagtttcaaagctcagatttgcacataaatcttgcgttaaaagcttataaacaggtcaagaactgaacttggagttggagcaaaacaagtgaacagataactattataaaattactgttgcccaaaaaaccaactttcccaacaggcccctgcctgatgatggcaatatggtttcagtaactagaatttcccagatagcttatcccccccccccggcccccctaaccattgtgtcatgtgcatcttccaatggcctgaaaattccctgatgtgtagcctagccccaccagcagtactgaatactgattccccatatattgcagaatgtgatacaatttactatggaattgccctctcaaaaaaaaaaactacggaattgcaggtctgttccctattaagtggacagaatcaaaccacgccaagttagctaaccagtgcagagagagtgcttattatccattacctcttgagggggccaaaagcacggcaccccatgacgagcagatcggccttgagatttgccgtcacctcgcagatcttctccttaggatccccaacgaccacatccgtcttcacctccacctgcaagaagatcatcccaatcatcaaacgagaaggctagaaatcaaaatcgtcgagcaattgtcagcacaaatgtggttccccttacattcttctcggagcaaatcttgagcgcgtgatccaggatagcctgcgtgatccgccgctggtgcgcctcgatcgcctgcgtgaacgccggcacctccacctcgcctgatcagccgcgcgtcacattcaggaagccatcaaacccagctcgaccaaacaaatttcgcaagaaccacagctcacagccacaggaccaagtgtccgtcctgatttccgcgaagacgagtgcgagagattgcttactcgggccgccgaaggggatgggtccggggttgagcccggcggcgatgctcggcggcggctggacgtggagcacgacgagcgcgccgtcggggcggaggcggaggttgtcgagcgcccaccgcagcgcgttcatgctctcctcgctcccgtccaccgccaccaccacgctggccaggttgccggtcgccatggcgagctccctcagctccggcccgagctcgcctcctcgcgcagtcaggggtcgcggaggcgcggcgatggttgcgtcgcgtgcttgcttcttctcctctcgtgctcagctcgatcaaacgagatgactacgcagccttccgctgagctgtgcaagtgactccttgactctctctctcttgtcatgtcacatggccgtctgatgcgctttgggttgggaagcttggatccgtcggatcaacggatcgagagatcgcacggctcagatgacctgctccagtcgcttaccaccgggctgctttcttcaagcatgaaccgcgctgatcaactgactggttgtctattaaggtgtgttttagggataggagattgataaaattgggaagatacgtaaaacgaggtaagccattagcgaatgattaattgagtataaactaatataaatttcaaaaatggattaatatgattttttaaaacaactttcctatagaaaaattttgcaaaaaacgcatcgtttagtaatttgggaagcgtgtgctcagaaaacaatgtactttctaactcaatgtatctagaacgaatgcagcctaagtggagtactccctccgtcccaaaataagtgtagttttgcactattcacgttcgacgtttgaccgttcgtcttatttaaaatttttttatgattagtatttttattgctattagatgataaaatatgaatagtattttatgtgtgactaaatatttttcaaatttttcacaaattttttaaataagacggacggtcaaacgttgggcacggatatccacggctgcacttattttgggacggaggtagtagtaatttggttgggtggaagtagtattactgatatgacagcagcgctgagattactgcaaggtaggaagagcaagtttaatagcatagtcgactactaactccaaatcatctataaccaatgtaatagtaaactcatacaataattgcttactatactattaatatgtggttccacatgtcatacacacattacgtcttgaagtctgtgctgcaattggctatagatctatagcccgttgctcttctattccttcttctatcttcttaaaatatatttatagctgtcttatagcctactattgtacctgctctaagagcaagtataatagtagactgtaagtcggctaaatgctgaggtgaagaagagaagagaggagaagcgagctgtaaacttatagctggtttggacacaagaactaaaaaattaaaaaattatgtgagatagacaagtgggtcctgtattaattgtaaatagctaactattatatgtgtgggtaaaaaaaaagctataaactactttataattaataagttggctgtattattatccttgctgtaacagcgttgcacatgaagtgatggtgcagtgattcagtgcaggtggatgtggtttgacccgccattgatccatcggttattcggttgttcctcccggcacgacagggttcacagttgttaaaccccggaaaagtcttcgtcgcattacagcctgctctgaatctccatcttgtaaattacttccttcgtaaaaagaaaaaaaatatattcctagcatctcaaaataaaattagtggatatgtagaagaactaaaatatccttaatcatgaaaaaaattagtaagagtaatatgtataggtaaagaatattatagggataaaacttctcattttacgtgctgagggtaggggtggacaaaaagcttgggctcgtgagctcggctcaggcttggctcgggctcgcatagctcggctcggctcgaaagccaaacgagtcgagcctaagcctccttcctaactcgtttccgaaacgagccaagcccgagctggctcacgagccgctcgtgagctcgcttggctcactgcaatagggtcatatgcaaaaattttgcaccttttctaactatttatttgttaaaaatgataactttaattgtcatattatatatttatgtgttgtgatgacatattaaagaaaaattatcacattattacacattctatgtggtaaaatgttgttcgatttctcttagatttgcttgagatttactcgatgccaggctcgcgagccagctcagcccataaacgagccgagccgagcttcccttgcaccaagctttcacgagctaagccaggctcagctcggctcgtttccacccctagctgaggataggtaggatggtagaagttagtttttgtgggataaaatttaaactctagaaattgagtttttttacgatggagggattaaacgctgttttaaagcgttcgtttctcatgaaaagggtggatgaaattttggatactcgtggcacgcttttcaatatgctaaacggtgcgtttcgtgcgaaaactttttatataaaagttgttctaaaatatatgattaatccatttttcaagtttgtaataattaaaactcaattaattacacgttattaccacctggttttacgtgaaacacttaatttttatcttcatctccatcttcagaagattcaaataccaactgaatttcttgcaaggtcaataaccagacatgattctgacaaggaacggtgtttcggcaggctcgtagcctcctgccagcatgaacggatgaaccgaacttcttgacattggcaatggcaaagcgtgcttcgaggttagagcgtctctcatctggggacgagttttgccttcacacaggcatgcgagagcacagcgcactacagactacagtctgcatatctgcacaaggcttgtagcatctagcagttcatcctttttttttttacgtcttgcgaagttctagagcagaaaaaaattataatgttactaccctggaggatcgtaaccaagaaaaagaaaaaaatataccaccacccacacgacgacatcgccatcacacaaggccaggagaaggctaacaccggaccggctgccgctaagcgtgaccgaccgccactaggccaacaaagggacacagacgaggtcgccacctaggggatgccaaaacgacgtcttcaagaagagaagcgacagagaaaccgccgccgtcatccgtcaggactcaaaagagccaagacagggctttcgcccggcaatcaccctttaggggtgagacagcacgacaacgccctcaggaggggggataaccatcgttgtctgtccgaccaaggccggactgggttttcacccgtcgctcaccacttgcgaatccacgcgtgacgcaccgatgctccaccaccacacaagctttgtcgacatgtgggacccctgcaccggtgtcccccgccggccagtcttcattcgccaaagaccgcaccacacccaccggcagctcctcctcacacctaggtcgcctcctccaccgccggccgcgccactctgcgccaagccggcctcctccaccggacgcgcctcgcgctaatccggtctccctccatcggtcgcgcctcccgcgccaagccggcctctatctctgccgctcgcgcctctcgcgccgagccggcctccactgtcatcggctgcgcttctctgcgccaagccggtctccgacccctccaccaaacgatgccgcgccggccagatgtagtcgtctcccacgccctcagctagccgtttgaggtagccatgcctccagtgactgcagacacggtcgccaccaccgcagccgctgctgcctaacgcccagccacctcgccgtcgccatcctcgcctcgcagccgactccttccccgccgccgacgtcgccaccgcctccacaaacggccgccgtcgtcgctgccaccgacgccagcccccgcatccacaacctgccgctgtgtcgtcgcccttcaccaacatgcggctggccgccgcccgatgccatgtgcaccactgccgccatcaccagccgacaccgcagccgccaactgccgcaaccgccgccgtcatcgccaactgccaccactgccattgccacaccgccgccgtcgtcgccgcacagccgccgcctgtaggatcgagatgtcgactagagggggggtgaataggcgatttaaaactaaatgacacctaatcaaaactaacctaagttgctaggcttggtgagggtcaactctaactaagcaactaagttatgttttgcaaacctaaagtgatagtggctcaattatatctctaggaaaagtaaatcacactcctatgtcaatgtttagcaatcctagggtgatatgatttcaagtatgtctctagaaatgtaaattgcacaaatgtaaatgcgacaatcaaattagacaaggggacaagagatttttcaccgaggttcggaaactcgccggtttcctactccccgttgaggcgagcccaactcgaccactcaaccacgaagccaccgcacgcccccttcatcaaggggtgggcaaggcgggagccgacccacggagaggactacccaagcctcgatcactagggtagttcttcctttactccgaaggtggtgaacaccaaaccactcacaaaccggcgccgggcctcctccacaatcttctcggagaagtcaccgggcaacttctccacaagccgtctaggaggcggcaacctacaagagtaacaagcaatgacccagcgtggagatgatcaatcaagtgccacactagctctacaaatggaagcgatgcacttgactcttggctaatcaaccctctaacacactagatagatgaacacaaagctcaagtgggtgtgagagaggtgcaagggatgtatgcaattgaattgggtgccaagagagtccccttgttgctggtggggaagtatttatactcccacccaccaaaactagccgttgggggcgaaatcccccaactttgtgctctgccggtctgaccggaggtatgtagccggtcagatcgtgctactctgcaacggctagaaaactagccgttgaagtgctgtcagagggctccatcggcctggccggtcagaccagtgttgagtgggcggtcagaccggcctcggctcggtcagaccgccatcggctcggtctgaccgactacggctccgtcggctctgtatcggccaccccgagcagcaccatcccggcctccaggggccggtctgaccgcgcatgtaccgccggtcagaccggccttatgcgccggtcagaccgccttcttgcggccggtcagaccggccaaggcacgccggtcagaccgccattatgtggccggtctgaccgcccctggtcaggccgagcccagtgaaatcccaagtgattgtgtgtgtgtgatgaaaagcgagcacacgtctaaatgcataatgacctaatgtggcaatttaatcatctctttactaggtcattacccctcttaatagtacggcgaaactagaaaataaactagcaaatttgacgccctacacctcgatcaattctaaattaaagcactagttttaccgtcttgtttttctttgctttgcgtcgtcaattttaatccatcgatagtcatccacgcgcacacatgatgtggacctaacttaaaatattatctcaatagcaacggtttgtccacaattagcgcttgtcattaattaccaaaattaacaacgggggcctagatgcttcaccgccaactgccgccggccaccctccaaatccggccgagaggcgcggatctgggggacaccgcgccgccgccgccgggcaccgcgtcatcgccaccacaagcccacacgggaccaccaccaccaccttcgcgcccgctgccggttccgtccccgccaccatcgccatccctgccgccatcagccgccgccgcccggcgccgcacgcccctgccttcgacgtcgccatccccgccgccgtcctccccgccgccagtcgccgccccgccagatccggccagagcggcctggatctggcggtcaccgccatcccgcttggtggctcccctgcccgcccggtgagaggtcggcgaggggccctgccgccgccgtccttgcggccggccggcggccgctcgagcagcagcgaggcagaggggatggggggagggagaggagcggccgggtcgtcacctcctgtgccgcccaaggggaggacgacgcgaggtagtcttctcttctgacgtggaacatagttcatccaaatttgatcctccatatacctatatggatgattatccaaaagagattcctcctttatattcctcctcactccaacaaatcatctatattacatcctctatatcatatccccctatattttattagtatctttcaactaccatatatttatattatttttcttttttcacctttctttttcttctctcttctcccgtcctctcgagctctcttctctttctctcttctccagcgatagagcaacgcgagcggaggggcgaggggcgccacgagcgatcgggggcggagggcggcgcgggcgacggggcggagggcagagggcggcgcgggcggagggcggcaggggcggagggccgcgtggaggagcggcgagcggcgggagcggaggggcggcgtgagcagcagagcgacgggagcggctggatttggccagagataggggcggaacggagttcgccgatgacgacggcatggcgtgcagcggtgcgcatcctctctaacttcgctcctccatgccttgatccggattggggcgggagaaccagatgggtgcggcggttgcaggatggcgttaggagagagaaacttcaaatataccgattctttctccggaatagcgcatgcgccatctttggaggccctgatggcgcatctgatggagccggattttctcctcccatgagctatatttcggatggaagatgggatagaggatctactgggatgctctaaaggcgatagtgcctcatattatctggcttatcttcctcctgtctatttcagatcgagttctgagtccaacaacatctcggcttggttacttcctactacttaattaatcgtgctaatgatagttctcgttttctgcgtcattgaaaatctctgcttacatcatccgccttaaaatgaatttatttttgagaatgaatttaaagaaccgcgtttgtccagaacttttactataagttgttattttgaggaggaagtgcttacctctggtctaaaataaattaaatttttacacatctcatacatatcaataaatatttttactttatcaaatctcaatacaattatctctcactttttctatctgtaatgcatttgtctcttacttctacaaacaacatataaataagaaaataataaaaataatacgaaaggagtacctcacaaacgaacgaagaaccagcctgtctttgttttgcagcacgtacgcgagtacagtaccacgtagcacaccaaaacaagactgctcgtagtacctgtactgtactgtacaccaaaacaggccacgagcagcagcagtgcccccgtaccgctagctaagctgtgtcgccgagccttgagccgctaggcgctagctgcatctgcatccagggtacgagtacagtggacacagctccgctgcacctaggcgcctgcccgtggcacggggtacgtcgttgtactgcacggtgcacgctgctgttcgctcccgtgcggcgcgtttcgccgggacaaggacacagacggctgtcttccgcgcgcgagggcccgtacgtcccggcgcgttacgccgttaattacgctgttatacgacgcatcgatcaagcggcagcagttgcgtgcatccacgcagcatcggttggatccgtggatcgcggctggctcggcgtccgcgggcgagagatcgtgtttgccgccggtgggcgaaaatcttcgtagccttttggatgccgcgagggctgacgtttccgcttgcggatagcgtgcgggttgggggcctggggtctcagctgtcgacacgcctgtttcctgacaccgcgtgacctgtttatgcacagtgaacttttgcgcgtttttgggcatggatcttgatgggttcatggtcggagttcggctcatagtcatggcccccaataagggaagctatagcctagcggcagagctgggcttgagcaaaccgcaaaaaggcgcgtatggcatttcgtcgcgattcccctgcatgcagggcttcgccgtacggccgcaacatgtcgaaggcattccaatttttttctttaaaattttaatttttccgtcacatcgaatatttagacatacgtataaagcatcaaatataaatgaaaaaaaccaattgtataatccgactttaaattgcgagacgaatcttttgagcctaattacaccatgatttgataatgttatcctacagtaaacatttgctaataacggattaattaggcttaatagaatcgtctcgcagtttccagacggaatctataatgtattttattattagtctgtttaatactttaaatacgtgtccatatataaaaaaaattttagcacgtgaactaaacacaaccaaagcatgagaaagcctgcactggggcaggagtgggctgtcgtgccattgactgctggagactaataaattattgaatttgctaaataatctattttttataatagatttatttttcgtcgctcttattagtcacagagtaaatttatttttcatcaatcattacattggagaagtttatgaaaatgagaggtaaatacatttagagtagatagagtagaaaaataatcgtattgtaatttgataaagttgagagcattttaattttcttattgatatgcgttgatagatgagaaatgaaattattttagaaaggaggaaacaacacactagaaagtcagaggatattgttgacccgttgaattcaggttaagatttatatctaggcggtggacacatacagatggggtgatagcaaccgagccacggagtcaaccatgagcagtggatcagtgttgccaacaggagcagacgaagcgactattcgatggtagcttgtggtgtggagtcacacgagatggggaaaacggtaaggcaggtacacccagctaccatgggcgtggggaggatgaggggtgaggggaatgagtccaatttgacggagggggctatgcatgaatcttaaagaggatataccaaaagtcacacgatatggagttcgattggttgtctaggtactctgtaacttaatattgatcttaaatataatagttgacctagattggtagccaaaaatagctactccatccgctccaaaatataaacatttttacacggatatctacaccatttgaacatggtgttatggaccataacatatgattgctcattgtctctatatcttattgaatataaccgctattgctcgttccagcatttgtccataaagacatgtaacttacagtaaattcttttaagggtttatttaataggcgtcattataaatatgcatattcagataaatgtcaatataattcgtctattcgaagtcatgccatacaaattttacaaaattaaaaccatgccatcaccgtcatgtttttcatcttcttccccatctgtgtgtgggactcactcgtcagattcatctttttcctctatcctcctctcttctattttccccatctctatccacctcttatcagctttctccacacattgcatcgagagcaagagcaagggcaaggatgtatcgagatcgatttgacctccaccccttctcccccctctgctcctcctagatggcgacgtcttttccaaatccctcacctttatttcctccttgcctcctcctcattcgccctctctcccgagtctaaaccctaaccctagcgcagccacttcccatggccaccgagtaccgcacacccgaccgcctcctatccgccgttgcccagcgaggagcatgcgtaaaatccgcccaagctggtgcttgttgttgccgcgacccatgacggcatccgattctagtattacatgcttgccggcgttatcgagcacacaacgatgttccccgtcgacaccctcaagatgaacatgcaggtcggtgccccaccctgttactcggtcctgtcattggaggccgccttgtctggctaagtagtggacacatgttagccaacatgaacaatagatgacaatatggatgacgccgtgtgcattggtttgagtccaagcatggaaggtggtgtgatgtgaaagttaatttgtcatccctcggtgcaaagcgaaggtatatatgaaaccgggtgtaaagggaaaacaaaataaatctacccgatgttaagtgcaatttactctttatttatttttacttatttgattatgctgtaaccgagttggatggcaaaccacgtatggtgtgatagatttacttccaccattatcctcctttttatctcctacatatgtgtttacagttcgcttatagtatgctgttgtatatgctctcactgcaaactataattaattaacctgaaaaatataacaaaggtcctttcagattgctgccgagtctaagggctcattcggaatgtaggattgaaaaaaatataggaataggaaaaatataggaataggataggaatgcaagtgtaaaacagatgatttgaaaacataggaatttcatgtgaataggtgtggatggagtaaaggaaaaacataggaatctttagaagaaaataggtgcactattacaaaattatcacatactactagtgaattaaacaacattaatcaacctaataatgtgctttagttgcttgatggcatgatttgcctcgttcccacgcgaagggagagaaaaaagaggtcagcatggatgtttttcttcctatgatcttccagtgatatggctagcgtaggaaatttctctatgtatttcctacgaacattttcatgtgatccaaatgacgccacagtaaagcaatccataggaacccaaatccttcatttttcctgtgtttctcctctattctgaacaagccctaaagaaattcaaggaggcacctgaacgccggccaattagtgccagcgcaaacagccgatcgctgagaaaatgtgaataaggcaaagcgcgaactctggaaagcgctcgagagaggtcggccggcgacccaacaacacaccaccaccggcctcgcgcccgcggcgcacacaagatcgccacagcgccgtggtcggaacagcgaatccggccgcctgcaggcacaggcggcagtgccacctccccacccccccaatccgctgcgtttccctctggcctcgtcccttcccaacaaacaaacccgccaccacacggcgcccagcgcccgtgctctcctctcctctcctctacccgcccagcccagccgcccatcccccctcctttccgcggtccttttgctcggttcagcacgcacgcgggcacgcggcacgccatcaccgcgcggccggccgcctgctgctgctacagccagtggagtactgttctgggccggccgcgccgcccgaagccaccaccctttccttttccggaagcctccccaatcctccgccattccccgcatagcgccccatgcccctaccgaccatagcctcccaatcccccatcgcctagctgcttcgccgtttattttaagatttttctttgggttgtgagtaaggcttggtggggcccagctcacggttccttctggcataaacaatgacttgggcctgcccgccccgtggcctcgccatccgacactgtgcctctcatcccgcgattagtatatttttgctgtttttttatgggtgaaaaactgtgtgggctctctcgttgggttgctatccgtccacccgtccattcatcctcgcctttgccagttgcggtgttgcccccctcgctttatttatgtcgacctgccaataggagcaagtccccgtctcgagacaccagccgcgccgcgcctcgcctcgcctcgcctcacctcacctcacctcaccctccgcctcgtctccttcccccctttcctctacccacgcacgccctctctcccatcccagccgtagccgcgccgtgacttgtctcgatcggcggcgaggaggagggcttccgttccctggccggtgggggaggatcaggcgggggggcggcggggagggggaggagatcggtctcggtcgatccgcgcgcggcggcgatggcgcgggagaggcgggagataaagaggatagagagcgcggcggcgcggcaggtcaccttctccaagcgccggcgcggcctgttcaagaaggccgaggagctctccgtgctctgcgacgccgacgtcgcgctcatcgtcttctcctccacggggaagctatcccacttcgcaagctccaggtatgctgttctactcccacgcctggatatctctcgactccgcttcgtctcccgcgtttcgatagatctagctaggcgcgtttcctcccccggtctccctttgacttcgatgtctaagatccatccgcctgggctagggtttaacacgggatattttaactagtaacacggatctcaccatttccacccgttcagaaaaatcaatacagttttagaacgactcgtggttactttcgccccctttagatgtaggggatttactgtagtgtatgtagtctgcacctgtacttttgcagattattttcgaggtgttctttttttggtgcatgagtagcccatcttatttggccattcctactggaaatatcgtacgacaactcctgttatttgctgtttatgtgcgcgtggagttaatcgatgtgtgtgtcgcagtagtgctgtgttggtgataaagctagctagctctgctgatagcctacggtcgtacgtgtgattttatgtgctgatgcgtcgcgttttaccctctgatcaatggggggtctcgtgttttgtgcacggaaaacctcgcttcctgttgttgttttcttttgcaatgtgttaaatcattgcagaactgttgtttgatgagaaatatcctgttgttgttttcttttgcaatgtgttaaatcattgcagagctgttgtttgatgagaaatatcctgttgttgttttcttttgcaatgtgttaaatcattgcagagctgttgtttgatgagaaatatggtagtctcctacacgtatcgttcgtcatatccatctcgccttatttgaggacaatgctttcctcattgcaatcccttttctgcgccttaattaggtattatactgttatgctgtatcgctatatgtatttacatcgtgctgttcagtcttgtttgcagctgtacaatatgagtttgtttatgatatactcgccctttaatttgttactcatgataacaaactgaaataatttactcatagatctttatcttgcatgtatccatttcgaaaagtttcctttgtcttaataaaagaaatgttgtactagtacatatctcattatatcttcatgtacctgtccatcacttcatcgtcactatatatatatatatatatatatatatatatatatatatatatatatatatatatatatatatatatatatatatatatatatatatatatacaaacaaacaaaaatggtgttagctagaattctcttttgctgagaaagtatcttaattattatttcaggtttgttaatttgcatcaatttataataccttaacttcttttacttcaaacagggattttgttaaacaattgcaatttgttttatgtaaatttaagtacatcatttttcatttcttcgatgaatgtagattatctcagataagataacctgatacttcctttactcttctacatatgaatttgtttagttcatatcatatataaaagaatggacggagtatgttttttatggttttacatcagttgtcagtagcacaacttaagcaaggattcaacttctcttgatgtacttttttagaaatgtgcacatatacaacttaatttcatccatggtacaatttatttttagttcatttctacaaactagagttaagtgttggaagaagataaagaataaactgggatggctggtactgttatatgtggacaatcattcagccttggtagcatttaaatatgttcattttacctggtagtgagtactggtagaatccataaatcgtgcttctatcaataaaaaatcacactctataatattaattcaattttggagctgcaaggcttggtttatctaagaagttactatttataaactaacatttgtcttgattatttgttctacagctggacaatgtattgatcctttcttctacatttggatgccataatatctgattttcttactgttttctttttcagtgcttaattcctatatttctgtcaatatcaacttacccgtgttaatttgaccagggaaaaccactttcatttctcaagattactcctgcaatgttatagacttgtagtctacttggcccgtgcctttataattatgaacattcatgtataatttatgttctattttcgttttatctgatggtctgtggcctactgtggtattgatgatgccttctgttggacagtatgaatgaaatcatcgacaagtacaacacacattctaataatctggggaaagcagaacagccttcgctcgacttgaatgtatgtgaatcatcttatcatactgtgttaatagtaaatactgttcttcatatatattgcatcttaatgttgcctaactacatatagtagtattagataatggttcaaaatgggtcattttatgtccatggccttagggtggcacaatagcaaaatattcatatttaggttttcacatctggtagcattatgatcttatttctgtaccctaaaattttacaaattaaacttaaaaaaacaatcgcatatgtggatcctttcaaagttctcagtatgctctaatgatgtctgttttgttggttgtgtgttaaatatgtaaattatttgttttaattttttgttgctggattttttttaaaaaaattaatacttgcagaaacaatttacatctctcacttcctcatatttttggtgatacactataaattaacattattaaataatatagttctctatctttttctattgtatcttgagaaaaattccctggaatcggtacactatagcacaatactaattctgttttttcatggatcatgaactcaaatttagtactgttagtagtaattagtgctcaggcatgatgtaataggtgccttaaacttatgcagatatattttctaaatgctacttatgcagatagttaatactaacagttcaatcttttcttttcagttagaacatagcaagtatgcacatttgaatgagcaacttgcggaagctagtctccggcttaggtcagttcttttaaccttttttttttaaaaaaaatgttatacttgaggcatttgttctcagatcctttattcttgaggcatttattctcaaatgtatatcattggtacatgaacaaattgtagacaaatgagaggtgaggagcttgagggattgagcattgatgaactccagcagctagagaagaacctggaagctggtctgcacagggtgatgctgacaaaggtttggtgatcatcacccagactcatcacgtagctcgtactatgaacaacttattgattgctatatgattttgcaggatcaacaatttatggagcagatcagtgaactccagcggaaggtaccacctgttgctagattaaccctgaatcatcaatgtagcttggcaacatataatttgttttttcttgcaaaagtagaacctttaaagaagactgtgttgcatacaagtatccgttgctggcttatttgtagttcattctttccaatacatcactgtgtaaaaagttgatttatagttctctccaatacagagtgaaatcacttataattttactgttgcatcttgcatgactaatatatgctgccaccttctgccttttcttgcaagatggcacatgcatctgttcaagcaaatttactaaatcatcaccaccctggccttttccccatggatgagtcggaattttggactaaattccctgcccaacccttggaagtctgcgggttttgttcatgccggaaaagtccttagcgattaaaaacaatttcttctagtccttattgtttcaattttaccaaattatattggcgttttaagtcatgtcccttcttcccccaaattgaaacattgattttgactatcttgaagatcaaattagagggtacccattggataaaataactaatttaaatggaaattgtactttagtttttctgtcctgcatcatttaccatttgcccatttacatacatttaagtattgtagatgtttcttgctgtgttggaaactgatcaaacagtaccatttcttgggaaatgcaatcttatagttaaaaaaagaatctacaatagattctaccgcatccaaaatgttcttgtgcctgcttgtttttattcaaacccttaccaattgaaataagagaacattataattatgtgttgcatactctctgttgcactgcagagttcacagctggcagaggagaacatgcaactcagaaaccaggtataaattttacttctgtaagctcttggtttgttgaggacttaagaccagtccatctgaacacattcgttttcttggtactgaatacaggtatcccagatatcaccagctgagaagcaagttgttgatactgaaaattttgttaccgaaggacagtcctctgaatctgtgatgactgcattgcattctggaagttcacagtcgcaggataatgatgatggctcggatgtatccctgaaattagggtgagtttctgatcactttgtttatgtgctgaagttaaattccaattcaagtttcaggaatattggtcatatgattatttggtttaatggattttaaggatgtgattggtgactttaatccttagatgtattatcatattatcaacaggcaagataatccatttatattattattaaactttattttgtatacatggatacaaattgtgtgtcgtgtttttctgggtattgtttgagaccgagctatggccttttgctaattcttattttcttataaatccagatatgtgtacctttttttaaaaaagatacatgtatacttaatacacatttgataaatgctttttttttctcttccttaagctatactattttatttcattccgcatgtcctaatacttggcaaatgtagttaagccacatttggttctctaattgcttattttctttttcttaattaagctatactttgtttcatgtcctaatacttgtcaaatgtagttaagccacatttggttctctgattggtttgagaagaaggatggaatttgaattcttgcctgggggtgtactcaactacgtttgattacttgtatttgcccttcagtattttgttcatttcgatttttcttcaactctacaatttgcaggctgccttgtggtgcatggaagtaactgaaaggaaaaaaaaagcatccttgcagatctggttggagtcgttgcggcatccaggggagaaacgcttgtgttattcccaaacccagactgcaataatataatcttgcgttggaagcgagatcagttaacctgatttatcatccttgtggctgcatgatgcgatgttccgcttgtactgttcgctaggatcttgactaaactttgagatctatgtgccgtttaattatcccatcgctattggcactccttatgcgatacatcatatatgcactttgttgctatcttaattatgatgcgtcttttgcagcgttctaagtatgatcttgcgctatcttgcattcttgcgtaatatatatacattgtcgctgtcgttagatttcagttcttagctagcagccactagttggtgttaatagcttttccttttcctttcccttttcttttcatgatttacctgtcacgctatttcgcgggctgcaatttgttgcttgagatatgctctgcatggaagaacactatgcagatgcgctccagcattgattttcattatgggatactaacggggtatatgttgctgtgtgctacagatgtacagcgacgcagcagaaaaggtgacagctgcagtatatgtactgatctttccatttaatattaaaaaatctatatctttccgtttgctcgcatatccttctattttggattaagagcctcaccgtttgacttatctgcggaataagctaaataatatgtgttcttagcgatgtaaaagcaaaggctaaaaaaattaatgtcgatgaaaaaaccttaaaatcggcttcaaatttaaggttaaaaatttagattttggttaataagtataagcataagtgaaaagataagaccgtaaatggttggatttcagttgccagatttattcatcagctagagaattaatccatatttggttcactgtagcatcgcctttgttcatctcattggtataagaaaataagtttaatctgtatatataacaattgcatattaaaattgtctttagaaacgttttttccaatattgattttttttactatcatatcttgatctaataaaacagatcaaaatagcatctcaaatattgtaaaaataacatgcccaaaggaaagttactacctccatcctcgttctcaaaaggacgatgtaacatgtgcaatcaaaccatgatttaaaatgtgaaacttatattgctaacttcgtcctaaaatatagtaatttctaactatataatatttatatatggataagtgtttgttgggatacataaccagtaaatatatattttaggatggagggatttgttaaaaaaactttcatttagttttagttaaaaaaaactttttaatcaaagtttaggatgtacttgaaattttttatatagtttaggagtatatggaattttttatttaaaataattctatatagtttagaaaaatagtgataaaatttgtgcattagattgttgatatctcttgtgtttgatttgggggtgagataaggaccctatttttttagaatatgatggttacattatcggttagatatgagggatggaagagtctgtgacccatgtcaacgagttgagaggaattgggttggattggtccgggcccctcaatttttaatgtgtgaagccaatccggatcttagagaaatattctccttgttaaccatctcacgtaaccccaaaccaaacacctcgactcaatctgacgcatgcttaaaaactgaggtggtgtgatagtggatcttgaacagttcttcttcactctattctcaattctcataagctgacaaacatggcccacttcccagctctcccagaaagcagcaaacatctatccaaccaatgaaccaaccaacacaagtcaataacacgacatactactcctacattgctattcatcttatcatagcatctccaacaacttctccatttcactctccaagctaaattttagccattatagtaaaaaaaatgtcctccaacaacatttccaactggccaaaacccttcctccactagccaaatttggtcagccaaaagtcactaggcaaccgtgggccctacacacattcctcctcccatctcctctccggctcctctctcgcatcggctcgacaacacagttctccaagctctcggcgccgtcgcttgccgcgacctccaccgtcctccacaccgtagccagccacagccgccgctatccttcgcgccgtcgtccgccgccgtcctccgtgccgtagcctctgctaagtagctagccacccccaacgtctctctcacttctgctagtgctccgctctcctctgctgctcaactccacggcgtgcgcgtctctctcactgtcttgtcttcgcaccgatgccgccggagcgcgctgtcctctcaagccgcaccctccgttgcagatgagctccaagcaccgctccgctgccgctgctgctcccgcggctgttgaagacgttgtcggggtctggtggcggtggcaggcaaggtgccagtgtcgaggtacgtgctgaggttgtcgtcgtcgcccgctacgaccgccgccgcctccactccatctctaccccctccccattgctgaggtcgtcgtcgtcgccgcgagcctccgccgtcgttgtgagcctctgcgcagtcgccatcgccgcattcgaggtagagggcgtggggaggagacagtagtacatgaggaggaagaagagagatatagcgaaggatgacaaatgggtcccatttgtcaaatacttataatggggatgatatatggagaggctgttggagcgagtagctagtttgaatagccaaattagatggaaagttggttatataggtgtttatatagttcgatttggagaggctgttggagacagggtttcccaaatcgccggtaccggggttactgcgccccggcggtaagcacggttaccgcggtaaccgcaaaaaaccgtgaaaaaccgtgcaaaatttatcaaaaattcaaattattttttaaatttatttgaatttaaggaggttactgtaatatttatattaccgtaccctgcggtaagcccagtaaccacgcggttaccgccgtaagggaaatccttgttggagatgctctcacgcccacgcagaggtccccctccgccccctctgctgtccccctccctcatttgaatcgagtaatcatccgcaccgcccctcccccatcccacagtacacacaggcgccgtcccgcaacgacacacacagcccacgaggccacgactctctccctccccctccccctctccctcctctcgccgtgagcggaacacgaggcaacgccgccacctcgagaagcgcgtcgccctctagggttttagagcagcagcgatggagggcggtggggagggcaccaccaccgccgcggcggcggcggcggtggctgcggggaaggaggaggaggcggaggtggtggtggtgaggaacccgaggtgctacctcgacgtgagcatcggcggggatatggaggggcggatcgtggtggagctctacgcctccgtggcccctcgcacggcggagaacttccgcgcgctctgcaccggcgagaagggcgtcagcgccgccaccggcgtgccgcttcactacaaggtttgtcctggtttggcggtccgtgtgctacccgtagtttttcctggttgcagccttggagggtcgacgcgtgagaggatgccggctgcggtgcgattgatcgtagttggggggtgtttaagctatccgagttggggattgtgtggtttcgcagatgaatttgatgctgtttgcgtactagtgcgatttccacctgacgattatgatttggttgtgcgctcacagaggttcgcatgattcagtaactatcgcgttccatagatttttattcagtaccgctgccattttaactttgttacttagcgcaatttccgcacaaacctcgcggtgaacatttgcacacttgcagcacatttactgctgagcaagttgatccccaaatccaacacaaatccgtttgcatggtccatttggtcgatggaaatagtattttcaggtgtctgcacgttgcaattggttgtttcagctttagctttgatttgtccccttctgtaacaacgccattccaagtcctcgcaggccttttgttttgattcgacaactttgctttcgctgacattgttacggtgtgttcctattgttagttctcatgtttggcgctagtactttgtatcgttccagttagtgttaactgcttttaatccatatggcttatctttgctttagtactagtgatagtgatgtgcttcatgtgccactgcctacaactggtcccggtactcaaattatggtcctatggccctcctttagttttgacgtcatctcactactcacttgcatggtggcctacctactttcttgtctgatcttatgatgtacacgctgaaacataaagcaccttagttttttttttcttttcaaatttgcatgcctttactttctgtggctttattgttggcaatgttacaatgtactacatattcctgaaatgcttaagcagagcactgccatgtttagcctgaaatgcgcacgcacacgcacaagactctaactcttttgataatttcgaccatgtgccagggttcaaaaagttggacatgataagaatactttcttacagttatgtctgcactaggtggacatgatactattccgattgtagattagccttaaagcagcatctgtctgcactaggtggaccaaggtttgtgtagtatctattatttgggaagtaatccaaggacaaactatatggctgtaagagaatcatatgcggatctggttcaatatggtcaacatttttaagtgaggcttggtatttaaaagctaagcttaggttctttagtcgtcagttggaatgatgatggcaaggaaacactaagtgcagtaatagtgacaagtcctacttgactgttgggggggcgacagggatccaactgcgtaatctgtggttctctactttattttgtagtggtggggactctagatgttggctatccttccacttaactgttgtggctatgatgctaattggacagagttagcatcattcttaaccttgaaaggttacaatggccatccattctttgctgaaagaaagaccatgattagcctttgttacattatttcttaatgttcacaatagttttcctttcttttttaccattgtgaatcatcggatctttaacttccaaaaaggttttactgactgcgtcaaccaatctttttttttttcttttggtgtttttactcctccagggttcatgtattcaccggattgtcaaaggttttatggtgcaaggtggggatattaccgctggtgatggaactgggggagagtcaatatatggattgaattttgaggatgaaaattttgtcctgaagcatgagagaaaagggatgttatcaatggctaatgctggtcccgatacaaatggatctcagtttttcatcactacaacccgaacaccacaccttgatgggaaacatgttgtttttggaagggttataaaaggaatgggggtggttcgctcaatggaacatgtttctgttggagaatctgaccgtccaattactgatattgttattgttgattgcggagaactaccagaaggtgccagtgatggagttgtgaactttttcagtgatggtgacatgtatcctgattggccaaatgatctcgaagaaaaacctgcagaaatttcttggtggatgactgctgttgactctgcaaaatcttttggaaatgaatatttcaaggtatgcacttcctttagcatcctttggaaattttctttaggtcatatgaggaaattctcactgcagcattatgtcttgcattgttagaatgttagttgcatcatcgtatgttatatagtaccggatgatgctcatgtccggagcttgtaactgaagtttcttcactatgcagaaaaaagattacaagacagccctcaaaaagtacagaaaagctatgagatacttagatctttgctgggagaaagaagagatagatgaaggtaggtatttttttttcttttcctatcagtcttcaattttgttaattttatcatttgatacttatagaccgaggcatatcgtactagctgattctaacagcttattgatgtgcagagaagagctcagcactacggaagacaaagtcaattatactcacaaatagttctgtaagtcccacaactaaccacttgttgcatgacaaatcataattcacaagtttcttccctttcgtaataaatatgagaaattatactgatgagacattattcattagtgctttctgaattgcatctaatgttattacatttcctgtaaattttagcctctgctataaatattgaatccacttatgacttgttcaggcttgcaagctgaagttgggagatttgaaaggtgctttactagatgcagactttgcattgcgtgaaggggagggaaacccaaaagcttttttccgtcaaggacaggttagtgttacactgttactgttgggtgtcatattacctgagatagcaaaatcttaatttgtggagttgtgcatgaggctgtgcttaaaaagccacatttgcatacttttgtatgcattagcaatgcagcactacaatctacatataatcctgttttacttgataaaatattatctgcaattcttgtttttgttgttgctgggaggatttgttcttagtgccttcatagtgagttcaaatttccagatttaacgcagtttaacatgatactgggatttgcaggcacgcatcgcactcaatgatattgatgctgcagttgagagcttcaagcatgctctgcagttggagccaaacgatggtttgtcccttgcccactcaattggctattaagtttcttcattggaagtttatatattttgtgttcataaatctaggaggaattaagcgggagctggctgctgcaaaaaagaaggttagtccattgagttcatgaatctttggactaatggatgttccttcattgaagatgttattgatctgtcaccgacattatcgcagattgctgacagacgggatcaggagcggaaagcattttctaggatgttccaaccatcaggaggttcagagaagatcgatgaagtactcttctgataccacattcaccatttggaatcttttgtttggatctttggcataacatcggtagaggatgtgtcatttggatgatagtttgttttgtttttctgcaggagaataactgatcggcttaagttcaacgttttgtagttctcttcatgacacatactggtgctgcctggtgaaaaaatagagttcaggttgctcttacagcccacagccactattccttcgaagtttgtgttgtttcaatatactgactccatttttatgctttcaggtgatggatgagagagtttttgcataacagaaggtgatggatgagagagttatgcagtttttgcataacagaaggtgatggatgagagagtttttgcataacagaaacaactcccatggttgaaaatagttttggtcttttggacaccaagccttatgttttgcagtatagagtttgccacaatgctatcgtaggaaatgtctggcggattgaattgtcaaactcttggaaaggccttttgaatgaccaatcctgttaacgaaacattgttggcaagtgttctcgcgtgtggttagcttaactttgccttttgctgtgtggtgtgtgctcttgttatggatagcctttttagttttgttcgcgttacaactcattacctccggagtttcatcaatcacaataatcatagctaaatagctttggtctagcaaacagccaatgagccaagcatgcgaggcgggtcatctcgcggtagaacctgaaatttgatctggacatgcttgtaggctcgtatcagttgaagaactcagagcctcagatacgtgcaattcttttcaacgcctcgtgttactgaactattgttccacaaattcatagctgaagcagtttgcaggggcagcaacccaacacaccactaattccacaaaattgagaccacgcacaagcatagccaaaatcctatcaacccaaacacaccattaattcccccaaaacatcctcagattgccaaaatttacgcacagtaaattcatttccctgtctatgcattgtagttgtccacgcccagatccctcaaggcagatgtggcagcatctttgcagctcccgtgcatcatcttggttttcctaataagcttctccacaccatcattaagcaagatcgtcctacaatggcagcacataagtcaacattctgatactagaagcatgttactatcgaactgtaaatgccttaattctgaataggtcatgccagcagacagtagtgcttgtgaattgtacagcataccggttttcagggtttctgacgacaagattacggatcataaggcaggcttgcttctgagtttgagcagaagaagggaacttttgcattgcctgtatagccaaagtgccataccctgctcccattgcacgagctgcattttctggtgaccgcagtgtaaggatagtcaccatagacattacctacacattcatttagcttgtaaaagttagcgcacatagatgcttcagtatttctcatttatatgcaatgtggcagtacctcttgtattattggtgggtcttcagaaaatctcgatgtcaacttcaagaacttatcaaaaccacctcgttcaatgatagtagtcttgtttgcatcacttccagccagcttcaagcagaaagaatggtctgtaagtatgattcatcaatgtaggatttcctctgttacaggattgatgcatttgtgtaccatactacagaccttggacagcagagagcagcaagattttgctataactttgttcttttgttcactagcctcatcaatacagcgaagaagcacatcaatcccaccattttcagatatggatctgcatatttcatcctgaggtaacacaagaatttagtaaagttatcctgaggcagctcataagtcataagagtatagcttgcagcttgtttttggttaaggacattgacaacagttccaccaggtaaagacatcttgttacaagtacaacagggatcaaaagcatgagaaaaaatagcaagagcaagatggtggtgggaagttgattataaagggcaccgtacttttcaaagtgttgcttaccataaatgttaaccatatgcaattgcagcagcagcaattcatattctttttgccagatgacattgaattaatggcataagaaatatctatagtagttcaaaataaacttttgaattccagtataaccatagttttctcttacattgacagcaattgccttcagagccgcacaagctgatggtaagctggaaggggcaactttctcacgtagtgcattgacaagaactgctgcaatcccagtttctgcgaacctccgagaatatccatatacctgcatcacaaatgttggtcaatgtcatctcctatgtccaaattccattcacttaaaaagtttcaaatggctagattgtcaattattacaataaaggttctctggatatttccactacatgtgctgtgcatattataactcaatttaattccatatctacatcttccctcatgtatgtaaactaacttgcatgcacaatcacaaatatgactctttttctataaacataactctagcacatcataatgtttaatactttaatactaccaaaaaccatagattacggagagttgacaactaaagtttcataataaagtgcaaataggtccacttgctaatgcaaaactggaccaaatattcacacaattacacaagcatataggacatacttgagaagccaccacacgattgtcatcaggtgtcaatagaacacgtatggcatcatacaagctttgcacattgctatttgatttctcccccataacttgaaaaatgagttcatcaaccttcaggaccataaagcactctttaacaacttcattgcctgcagatgctgaagccacaaccctaaagccaccttccagtatatctgaactttctgaacctcctttcaaaatacccatgacaacttggggcccttcgctttgcctgaacttttcagtgcttccaacatctacagattgaattgttacctcaaatgtcagggagagagcagagattgcttcttcttatcgataatattatgaaaatgaatgcaagacactgcaacggacatggaagtacagtactcttgacaagtttatgttgcatgtgcgctgacagatcaaggaatgggaccagtccattattttgacttaatgccatttgaacctagcaattggatggtgagtctaccttcacaattgtatgaattttgaatgaaccagtctgtacctgatttcttactacaacacaccattccaacacattctcacacttgcatgttataagaaatttatgaccagcagaaacaagtctgaatttctactgcctctatgctaatagtattagttcaacagaatttctaatcacaacaaaaaacttaagcttacaacagtaagaagtaagaaactaataatagcataaccaaaacagaacacatcctcatatctcagaggtaataacatcaacttaccgcggagcaaggagcttagcgccttcaagcccgaggcaagtagtctctcctgcttaaccccagccgacgcgcacagggcgacgagcgcctccacgccgccattccgagcagcgaccgccgcattctccaacccatcgccggagcacagctcgcgcaactcgtcgagcaaagaggccaacctctcagcatcctcctcggacctgccgccactgtcactgtcactggcagaagaggccttcacctcgtccagcacccgcatcaccgggctcacctccgccgcggcggcctctccaggcacgcgcttgatgatccctggttaggaggcaacgggaggagagagactcgatcaggcgagggtatgcgaagatcggggagatgcggatctggaaggggatggagaggtggaggagttggtgggtgattaccggagaggtcggcaccttggagggtgagggcgtcgacggcgtcggcgagggcctcgtcggcgtccatgccgaggtcctccatgttctcccgcaccatggcgtcgaacgcctcctgagagatcgcgatcgccatttttgctccgcctgttggcttcggtgccggctgccgagtgaacaagtttcagtagtagtacgtgcctttcttggtttttcctattctgagggggcggtttcagttttgaatttggatttctttaccgctacgctgaagacgaaaattaattagcactgatgttagattaattttcaactagtttttggaataacaaattttgcctctagatcattatgaactgatcaaatctaaatcttcgccgggcaaaaaaaaaaatcgggctattttttttcgttgggctatcctctgcccgtattattccaagatttatgtttcgcaataatagaataatcaaataaaacaatcgaacacttgtttattatagaatttataagtgtacaaagtttaaatatttatatgtttattagtagaaactcttgtgtaaccagatggctactactagatggtatgattatgcgcctaactcactactcctccgtcccacagaaaaccaacctactattggatgtgatgttttttttagtataggctgtgttctttgctgggagttcccaactccccaatttcgttttccgcgctcacgctttttaaactacctgtgcgttttttgcaaaaaaaaaagtttctatatgaaagttgcttaaaaaatcatattgatctactttttaaaaaaatagctaatacttaattaatcacacgttaatacgaacatcgttttgcatgccggggcccaacccctcctcccgaacacagccttactcttgtctagattcattgtcctataaaacatcccatccaatactagattggctttttttgggacggagggagtacagtttaaatcttggatttggcactaggtcgttggctcatatagacgcgttatgtgttgtgcccttactacaaggtatttgatccttcaaacatagttctaagcatttataaaagatacatgtgtgggtgggtgtgatctgtgatgtggataaatactacttgctctgtttcatatcataaatcacgttgattttttttctaagttaattttttgtgagtttaactaagtttattgagaaatataacaacttttataataccaaattagttcattaaacataacattaaatatattttagttagtttgtttggtattgaaaatattgttactttttttataaacttgatcaaacgtaaaagaatttaactttaaaaaaaatttaaacatcttataacacgaaacgaagggactactgagtatatatggtttaccatttgctacagtgaatattgtctaatacagtatatttatgtacaacggttttatgcgaaaaaatacaataaatattgtcattttaccgttactgtgttaaactcaaatactcaataaaccaactcatacatacatgtagcgacagaatcactgtgaggctgcgatctgagcgactccgttcaaacaggaagatacttgcagctctgtgaagcttgttttctctatcaccgtttggtctcctcggctgtcaatacacaaaccatccatcccttttgttcttttcagaagttcgaaaacgatacgagttactgccaaaatgcaggaaaaaaaaaagccgcgcgatgaaccccaccatttttgacctgcatttccccagcttccgacgagagaaaagatccaaaaacccagcgaccaccgtgcggtcggcaggacaaaaacgggcgttgaaacgagggacacggctaggaagcaaatcaatcgaccaactactgcttcggctcccatcggatggcgtaataagccaaagaaaaagctaaattttaaatttttaagtttaattttgagatatttttaatgtaatttctttttcaacatcggcttttaagtcaccaagaatacatttataaaaagttttacctacaaatttatttttattttctaataaaccgttttagcttattagaaaataagccaaacgatgggactttcgttcagccgacatgcctgccttgtctgacgccgacgagtcgacgacgacacgcatcgtgcagggagcaacaaggcgagtaggagtaggagaacatctgaaccgaatcgccatgttcagattttgctccaggatgatgacgatgatgcatcgcacgtcgttggcagaggaatgtctggtggtcagactgttcgttcgtgcgtgcgtgcatgcatagcatttggcaatggaaggggcgtcatgggcacgttgtctttgagttgggagttgggagaggcagtgccgatcgctgatggtcagataatcttgcgaaatctagctcaggtggttggtgatttgatttagtattattgttcagaacatggctatcacttcgattcactgaagcaacagcggccgtatgtacttccattttgttcgtggccttcggtgttttgttagtgaaaatgacttagagttcgtcagaaggaaaggatcacccgaaaaaggaactctgaactaccccttgtccaagtacagtgatgataatactactactagtaccaaacaacaagagttctcattcagaatgaacagcgccggtgaccggtgttattgctgcatgcccttctgttctcttgtactagtactggttagtggttataactaatgtggctactgttatattcaaacgatgttatgctgaataaatggttatggtccttatggaggacaaagcaaataaatgaggaaaagatccatgtagagactagagagagcacagtagcacactagagaaggggggaaaacatgagttcaggtaaacaggggaaaagatagagtaactagcaatcagaaagagatgtcgaacaagtcatatgaatcatatgataaactcttctatcaccgtgtaacacaaaatgtagtaatacatcgcggtatatcgatccaaaagaccaaactaaccaagaaaaaaaaacactatggccccgtctggaacgcaggattttaacaggaaactactcagttgtctgaggtaaatacgaaaattcctgcgttccaaacggcgcaaagaaaagaattttacattgtcactgttccaataaaaatcgaagaaaatgatcgccgtgctgaggaggagaatccatcaattcttcttcgctaggatgacgagagattaacgccatggattctttacctgttcatcacagacctggcggcggcgcgacggtggccgaagtgcagcgacgagccgttgaaccctttggccagccggtgcaggccggggttcagccggacgcaccccatcacgctctgccggtgcggcgatgccatgccgtcctccgccgctgtagccttcttgctctgcttcttgtgcttcccggcggagacatcgccgttggcggcggcggactgacccgcggtcgccttcttgaccggcgtcccgagctgttgcaccggcgagtacttgaacaccggctccttgctgatgttggcgccggcggcgcgagctttcgccgctgacctgcggaacaggagcatgtcgctgagccgccacttcttcctcccgccattgatcatcgtcgccggaggaatgcagcgcggcgacgtgacggagacggggtctggcttcttgggcgaggaggctgttccggcgtcggcggtgtctttggcgccggcgccgagaggggaggggcccttggctgccttcgccagggcggtggagaacggatcaaagtcgacgccggaaccgaccttgccgcgtagtctgggagaccacatcggcgacttggagatcggtgaccgtggcgatgacgcgacgctgccgccgtcgagcagacccggaggtggcttgagcggccggatcttccccttgtcgaagagttcgtcggccgtcgtcagttcgggcacctgcacgctcttgtcgaggaggacgccgaagtcgaagtcggcgtcgtccacctcgccaacgttggccgacgtcgcggcggctgcgcaggtggcgagctcgctcttcggcttcggcttccccggcttctcttcccagtcgaacggcacggtggaggtggcagtgccagatgagtacgacgcgcggggctggaagtcgtcgtcgtcgtcgccgacgacggccatgtcgtggtcggcgccgttcccgtcgccgacgccgccgtcgaactgcgcgtatatggcggcggcgcgcgccgggctggcgggcgcgctggtgaagtgctggaagaggtcgaacgggtcggcggcgccgggggatgcggactggtggttgagctcgaacgggttgggcgacggtggcgccgtcaccgccgtggccaagaacgggttggagtccatggcgtcggcggagaagaacgggttggtgccagccgacgccaccccctccgggaaggcgctgaacgccgggccgtcgaatcggaagtcctcttgcggcggcggcggcggcggcgaggcgggcagcgccgtcgtgagctccatcacggtgttcgacgggatgggtgggttgtccagagcgcgtcgtggcgagaaggttttgaggaggcggagatcgacgtgccggggacttcaaatggaagggtgattactagttgccatgttggggtcggggtgctccgaattaggagcatctaataatcgtggtattaagtgttttgaagttggtgatggtgacccatcatgtacacgttaaaatacacatcattcgtgcttttcttttttctttttgttacacgttagaatacggtacgcatatgctgacaagcattccatttcacattatcgaaaacattccaattgtgtgcttattctttgaacatttatccttagcattattaaactgtgccgcttttctaaagtttgatcttaaatgtgttctatctaagcttggcacatgcaaattattagggtaattattacaaacagtttcataatactaaaagtttgatattatgttggatgtaaatgtatagaggctagaaagataaaagtaattatacacaaatcttgcagcagtcctgtggaaatggctagtgtttaataaatattttagctttcgtcttacgtgtaatcgtaaaaaaatatatgatagatgaaataagcgtaactcaactagatagttttttatggtggattaccacctaggttaaagtcatacacgactcatgtttacaactaattattttttagtggtagaattttatcaatatcaaaatatgttggtccaattcattaatacggtaagcatacacgcatacgtgagtacttgtttttacaccatattcccattttaaaaagagggagcgagagggaaagtttcatcattagacaattggggaagtggatcttcttagtttttttgtagattgtaattgagttactgacatgtggacctattttactatggctcatatgtcaatagcataactgtaaattccataaattcaaacaagcctcattcgattattggataatcccctttcataaccaaagtgatagttggatagtctttttccgcgaatgcgcaaaagaattgcacgtcaatagatagttggatagtccgatacttattcagccatagtataaacgattctttttgaaacatagtataaacgattttgatatatgagacacattatattattacgaataggtatttgcaatgtgggcttacccatgactcggtgacccactgtcttctacctaatctgtgggctctcaccccaagaaaaaaagtttcaattcggctgctgataggcaggacaaaggttctcaggacaaatcaagaagggcttttatagggtttgttcactttgctaccattttcaatcttatcaagttttggcattgccaaattttggtaagattgctaaaaccttggcaaggttgctaaattttgacaatatttcatatgtacttactaaaatttagcaacaaactaaacgtagctaaaattttaataactttaaaaaaaataatatagttgaaaattgcatcaaagtgaacaagcccctagtttggcagctcagtttagcccaaactgcttccctctcgtttggtgttagaaccaactcgaaactcttttttttttttgaggggaagaaccaactcgaaactctagtctaattcgaaaccattatctccttttaaatttcgaacacaaacatgagatggtgagaaattcaaaactctcaaacttgcaaaactctccaccctcccttatacaactgcacatgctgcagacacgtccgtaaaacgccaaaaattcccaacgcagttgcgtgtaccataattcacaccaaccccatttccaccacaggaaattcaaaccataaaaatccaaaaaaaagagcaaaagatttgtaatcacaaagatttttctcctcttcttctttaagcccaagcaaaacccctgtgggagaagaaggcccagaagcggaggaaatcctaatctcgccccagctagccacgccgccacgttgccccctcctccaatccacagaggaggaaaccacagtcgccggcaaagctggacacctgcgccatggagcgggtggcgctgctccgcaactccggccgccgcctcctccaccgctgccgccggcccaggcccgtcgtccaggccgcggggccgtccgcgccgtaccgcccgtcgtcgtcgtcgcacagccgcgcgggtctacccggcggcgcgcggctcctggccgccgcggcgccgctgcactgcgccgggcggtactggccgcacgccgcgcctcgcttcgtccggcgcctctccgcccctgccgtgtccacgtcgccctcacccgtgcccagtggtaagggctgcttgcttttacctgaactcgtatagtagtatatgtatcagaacgagctatacggagctagtcatgagtgaagtttcgcttgctgtttccagtaattgctaataaacccgcttggaagttgataactgatagaatttccattgagataatcatgaaaactcgtgtcagaattccacattttgcttcagcttgtgagttgtcaatgggatagctgagaagacaatgcttgtgaagaacgaagcattcagaacggcatctctttgttatttggagtgaccccgtgtgacgctctcacgctcttattggtcgcgtttgagaatgaatgtgtgatctgtgttccttctgacataagcagatacagatgacgtccatgagtatgctgcaaagttagggtttgagaaggtatctgaacagagcatagatgagtgcaaatcaactgctgtcctttacaagcacaagaagacaggcgcagaagtgatgtctgtatcaaatgatgatgagaataaagtgtttggcattgttttccgcactccaccgtaagtgcatttattccttgtttctttggttctttgcttaagattatcataaagattgaagaagatgtgcctatccatcaataagaaacgaaaagaaagaaatagttgcagttaagcctactgcgatttttttaaaaaggagtatattctttcattaccaggaaaaattcgactggaatacctcacatccttgaacatagtgttctctgtggatcaagaaagtaccctttaaaagagccatttgttgagctcttaaagggcagcctgcacactttcctgaatgcgttcacttatccagatcggacatgttatccagttgcttcaacaaacgctaaggtgataaaaaattgctaaagttatttctgctgtgactatttatagcatcatcacccttcatgttgctcttcatgttgttgccttgcaggacttctataacttggtagatgtataccttgatgcagtctttttccctagatgtgttgaggacttccaaacatttcaacaggaaggttggcattatgaacttgacaatcctgaagaggagatatcctacaaaggtttgattactcattctattctaatggagtgagcactttcaaaaggtgtatgtacataatccgtttaatatgttaaatttaggtgttgtcttcaatgagatgaaaggagtttactctcaacctgacaacctaatggggcgtgtatctcaacaggttaactatttctttcatttcatctgtaattatgtatttgtcatcttatgcatgatattttttccccggggatcaccctgttggataatggatacactatcatgatcaatgccttttccctgcaatctatctattgcaaaatatggaacttacatatctacatccatggtccagactgtttcatttcgtcttttaggttccattattctgtctatgcttgttttaagctgatgcttgaatactcttctgtactgttcttggaaaattgaaaaggcgattctatatagctccttgtcatgattctagctggccaattgctgaagttaaaaaatgttagttcgtaacatttctgaactttctgcaggcccttttccctgagaacacttatggtgtggatagcggtggagacccaaatgaaatcccaaagcttacttttgaagaattcaaggttttgtgaaacgtaatctcatcccaaaatttggtgttgccattggtttctatagtaaaaaatatgtactaggtcatgtgttattaccctatacctctaatggtagatgtttttatcctatactcttttgctctcccatagttagaagtttggatgattgttagttttttattggaaacataaagagaaattactgcatcattgcatcatattattgcttgaagccaatgcttgattaatttgttttgcatttaaatccctgcctttctttgtcttatgttcaggagttccacagcaagtattatcatccaagtaatgctaggatctggttctatggtgatgatgacccaaaagaacgcctacgcgttctaagtggtaagtcatctatctaacaatagttacctgtgcttattcaacaggtcattttccaaccaccttttggtggtatgaaaagtctcaagtttttcttccatgctgtgttcctcttctgtagaatatctcgatcagtttgaagccagccctgctcctaatgaatctaagatttggccacagaggctattcaaagaaccagtgagaattgttgagaagtatcctgttggtcaggaaggggatctaaagaagaaatttatggtgtgtattaattggctgctgtcagagcagccactagatgtagaaactgagcttacgcttggtttcttggaccaccttttgttgggaactcctgcttcaccccttagaaggattcttcttgaaagtggtttaggggatgctatagtaggtggtggtgttgaagatgagctccttcagccacaattcagtataggtttgaaaggtgtatctgaggataacattaaagaagttgaagagttggtaatgcaaactttgaagaatctggcagaggaagggtttgcaccagaagcagtggaggcatctatgaacacaattgaattcgctcttagggagaacaacacaggatcgttccctcgaggcttgtctctgatgcttcgttcgattgtatgaactcatcactcttttttttttttccattttgaaataaaagtacagatgtgtttggacatactcatgattctttgtcacaaacattttcagggaaaatggatatatgacatggacccttttgagcctctgaaatatgaacgcccattgcagcagttgaaagcacgcattgcagcagagggatctaaagcagtattttcaccactcttggagaaatttttattgaataatgcgcatcgtgccacaattgaaatgcaggtctaaagcacatcatatattgtacattaggacattttttgaaatgcaccagataaccttaaaattttaaacctcattgtgcagcctgatccagagaaggcttcacgtgatgaagcagctgagaaagagattctaaagcaagtaaaggctagcatgactcgagaggatcttgcagaattggcacgtgccacaaaagagctgaaggataaacaagaaactccagatcccccagaagctctaaaagctgtccctagcctgtcattgcaagatatccctaaagagcctattcatgtacctatagaggtaattcttcagcttgcattgtgctctatttggccaatatgagaatttagtaatttactggcaaagctaacttctgggagtcataccaaatagttcctcatcgtgtgagataagattaattgcctgattgggcaagagattgattggaagttactgtatgtttttattttcatttgttgtggttgcgacttgcgagagctatctaattgcacattttaagggaagctaacatcatgatacaatacatgttgcaattttccagtttatgaaattatagaatagaacataggctccaagagtttgaccaaactagaaattggtacaaaagatcctttgcaaaaatacatgggaagctttataatattataactataaactatttattaggagctacagctatatttcttcattttacaattttaattggactgaagaatgcgatattcatgtcatttgtaggtgggagagataaacggggtcaaggttttgcaacatgatctctttaccaatgatgttgtctactccgaaattgtatttgacatgagttcgttgaagaaagatcatctgcagttgttgccgttgttctggtgagccagttgatcaatacattattgttaaccggccatgatgatgctcattttttgttctcttcgtgcctttatataccgtgaggtatttgaactaactatgaacatgtctgccagccaatctttgctggagatgggcacaaaagacatggacttcgtgcagcttaaccaattaattggaagaaaaactggaggcatatcagtttacccattcacatcgtcgataaggggaaaagatgatcctcttactcggatcgttgttagggggaagtctatggcaacacgagtagaagatttgtttaatctggtacgcttgtgatccttgtctgtgtagaccatagaggcaaagccgcacaggcaatgatagggtctacaatacagcttaaatctgtttattttgtatgaaaccatctaaacaaatattccatagtcatgcaattactgccgttgtgtttacattatccgaatcagcttatgttctgttctttcagatttactgcattctccaagatgttcagttcacagagcagcagaggttcaagcagtttgtttctcaaagtaaagcaagaatggaggtaataactagtatcagcagtatgtgtgtggatgatcatatgcttgcatgtaatgtggttatctaatgatttgttcaacagaatcgattgaggggcagtggccatggcatagctgctgctagaatggatgctaagttaaatgcagctggatggattgctgagcagatgggtggtattaggtaagattctttacagcaaacataaataagcgcctgcagattgttaattctgctgcctttcaaaattgatattgcatgatcattattgccttgtaggcataatcatattgactatggggtagtctttttcttgagataggcctcccttcatttctattgttatttctattgttttgttattttcatttatttgagcgataggcctccctgcattttgtgaagcaatttgtaagagttgcatacttgcattaaaatcgcacaagcagctattattttaatcaatattcatttctgtgcaagtggcatctttcactaccagagttatgtttgacactatcacattctccaatattgaaatattaatttttccatgttgctatggctagttatcttgagtatttacgtgatctggaaacgaagatcgatcaagattgggacaaaatatcatcttcgcttgaggaaatgagacaatctctctttagaaaggacggttgcctggtcaacataacaagtgactggaaaaatcttgagaaatctaacaaacatattgccaaatttcttgattcgctgccaagtactacatcccttggaagtgatccatggctttctcgattgccatctgttaacgaagctatcgttgtacccactcaggtaaggaaattttcctggcattatatttaagcagcctttgctgacgagtactcattggtaacagtgaacggtgagttccaactgatttagttatctgaaattgtttttgtcatctgaaggttaattatgttggaaaagctggaaacctgtaccaaagtggatatcagctcaatggaagtgcctatgtcatctccaagcatataagcaatacgtggttgtgggaccgtgttcgagttagtggtggtgcatatggagggttttgtgattttgacacccattcaggttcgttgtttttagatatgtttctcttttaaataatctgttgcatttttaaataactagtaactctttcagctggttcaaactattcacataatgctaatattgttttccttttcaggagtgttctcatacttgtcataccgtgatccaaatttattgaaaacactagaagtttatgatgagacggccaagttcctaagagagctagaaatggatgatgattgtctcacaaaagctattattggtaccataggtgacgttgattcctaccagctgccagatgctaaaggttacagcaggtacgaaaagcctcttctgtgttctgcatactcattcaacatggtctttcatcttgttgttggttgttatactgtcatggggattatatccatgtaaatactagaaatttcttatttgatatgcaaccatttattgtttgtctccttacgaattagttacatctttcagagattacatgtcgtttttaaaccaactgcagtttaacttgtatatggtgtgattatgaacatatagatgtactatatgggcaaatttatatcatgcatctgcacatggtacaataacacattcataatacagaagacactgaacacatatttttcagtctaatgcgatacttgctgggcatcacggtggaggaacgccagcaaagacgtgaagagatactatcaaccaggtaatgaaatccatggtccaaaaaaagtcgtaaaccttttttttttccccttacagacgcacgaaactgtcatcttgatccttttggttttcatgttggcagcttgaaggatttcaaggagtttgctgatgctgtcgaaacaattaacgacaacggtgtcgtggttgccgttgcatcacctgaggacgtcgaagcagcaaacaaggaaaatcccttgttttcagacgtcaagaagtgcctgtgaagctccttcatttctgctgcctttgcaggattttagtctagatctgcgctgagcacagaggttcttcagtctctcctcgcctacgaatgatgattctgatactgtaacatcatatcttacatagcgagagtatccagccatgattttttttctcgcaattttggggacaacagtagttcaggatgatgggcaaagtgtattcagtgtatttcacttgcattgctgctttccccatcaaacaagtcagatgtacgcgaagtttctgacagaagataaataagagattgctcaaattgttgctccagattcactgattgggtgcacgtaggcacgaatcgcacaattcgcgcattacctgcgttaaatcactctgctgtgtcaagtttcatcttacaaagctacaatctgccattggtcactcttgatgaagagtcgaagtatgtaaccgaaaggcagcaagaagccaagaaccaagaatagacgatcatctgacatcttgtgatagtgaatatgataaatgccacaaatcatggtgcttctagtaacaaattttcaacactaattaaacgccactagatgtagctgattaataatcacaaactcaatcaaggttaatccgaacggaaagggctaatcctgcaatgacgccggtgatgcttctcacttcctgacgccgcgttgcagctgctgctgcgcctgatgctgctgcttgtgcagctgcgcggacgcgatggccagcatggaccgcaccttcgccacggcagccgccttctccggcgggcagctcgccagcgccacccgcagcgaccgcacggccgcgtccgccctcccggccccgagcgccgcgcacgccgcgcggtacgcctcgtccgcgaccttcgcgtcgtagcaggcggcggcggcggaggcctccccttccacacgcgcctcgcccccgggcggcggtgccgcctgctgcggctccgaggaggcggtggcggggtcgagttgcgcgcaggagcgggcgtactcggtggcggcgatggcggcgtcgatctgggacatgagggcctcgggcgtcgacgggaagccgcggatcgcgtcgaacgggctccacccttgcccccctctgccgaacccgccgtacatggctagcgatgcgatgcggcgcggtcgcgcggaggaagacggcaagagaggccaaggagagttcaggacttcaggttactttagttaggctgcgttcgttcggagaaaaagggagtttctttgtttagttttccacgtgcacgcttcccaaactactaaatggtgtgttttttttaaaaaaagttatatgaaagttgctttaaaaaatcatattaattcatttttaaagttttaaatagttaatactcaattaatcatgcgctaatggctcacctcgttttccgaatcttctcaatcccctctccctcaaacacaatcttaggggactttggaaagaacacggagtagtgcagaaatcagaaattcagaaccggcctaccgtccgtatggacgtgtcccactcttgtcgcgtgttgccgtgtttctcattcgattttgatttctgggtggttactataaggtgggtcttcgcgctaaaattagaaatttggttgaaattgaaataatgtaacgaaaaagttggaactttatgtgtgtaaaaaaattttgatgtgataaaaaagttgaaagtttgaaaaaaaaagtttggaactaaactcagccttagtccgttaagtcattttagttttgccaacaattttttttttaaaaaaacacagtataagtgcaaacgtttataacacaaccctacgaacacacgtacaccttgccttataagcacaaccctgatgccttatgaagcgtataaagtagataaagttaactcatgacaaaacaaaaaatagcatacaatatgaaacagaggtgtaaacctatgagcgcttccgtgataacatataaagtgtataaacttatttcctgagacctataaagtgtacaaactcggttaagttagagaagttttaactcacgaccaaaaaaaaaacataatatgagacgaagttaccatatgtaaatagattaagtccgttttggattagtaatccgaatggtgctttaggaaagttcgtgatcagagacaaaagaattggagcggaaaatgtgcaagagcaccatcatttctcttgatggaaccattgtatttaatcagtctactcacattcccttggccacaaaataagcctccctcaaatgaaccttttgctatcagaacgactaatctaaggtttacatcatattcgtatatacccaagacaagagaaagagaaacgtatcatggcaaaagaaaaaaaaaacgaggaagaatcggtatatgaagttgctttggttaagtttttcatcggtacaaatctcccaatctcagatgagcctctggggactaacagctcatgcgctgatgacacctgacatccagggcacaacgacaggggcagtgggatgagaatctctgtatgactcggaatacttgtctttgaagttgagtttagggtggtcagcctgcaagcattgaaccatcataagagaagaaataaaccatttcatgacactctcagacactacagtaaacaatgcccaggtgtttcattaagtattttagcttacaaaacaaacctatggcgaagaaacacataaaattcattacaaacttggatttctgaagactaacaagtgcaatgagcaaccaactccttcaaaacagtacatgggtcagaattatgcaggataatttgatactagctcatattaaattatttttttgcggcaaattaaatctcaatatttttttgtaaagcatcaaacatgaggctggtgcagatcagtgaacaaatccataatatgacaaatgcacaagcatacagacttgcagaatagcaatatgaacaccagcaccaccttgtatctgacttctgccattcaaatcctttactactactaaatggtaatcaaagggccgtgcttaaggcataaatattttccaaatcatttctatatagtaactaaacagcaagccatctcgtgcacatgtaaaatgcataaaaaaaactggggttctaacactcatttaaactgaaaacaataaagatgcaaatattaagggctgtaatttcaatggttggtgcataaatatagaacaaaactgagtatacctgtttcaaccagcactcctgatgtttatgctcatatttatctggagagaaacatccaaactctgatgggcaataaacccatatattacaccttagttcacctggcctggcattcttagcctggtctagacatgcttgacagcaatcggcagcagattctttggggtgtgttaagccccatctaacagcagcaccatcgtaatcagtatgtagctcagcattgcattgtgagggcaaaggtggaccagctattatctcttcttctgcaacaattaacataggttggaaactaaaatctcattttgagaacttcaaaatatagtctataactacaactacaaaggtaaaaaggacacaattgtttgaactgaggccatgaatgctctgaacttcataaataaacacaaaaaagagaccttctggttcattctcaggtttgtcatcatgttcagtgtgtgagacttctgatggtatccaaagaccaatgtcttccagcagcacatgccagttgaactgtagtgctcgctttaaggttcctacaggaaaatattgaaattcagtgtatatagccaaaggcctagcatcactaatcagaaaagaatacgagcacacagaatagtagattcaatagaaaagcccacgtacttgcttcctcgttggagaggtctaactttgttgagttctgaatagatgcactttttatatcttttaacttctcgaaacgccatgattccactgcttctgttatgtattaggaaaaaatagatgtaggtactccaatatgaaaaatcaagaaaatatcttaataatttgtagaaggctacttaataagttagtatagaaatatgtatcttgcatgttgtggcaagaagcaaaacaattggaatgcaaaccaaaaacgaggttcagttctgctgtgatactgttagctttggaacttgtaggaaatattaggcaaataaattatggcaaactgttataatagtcggtattatcgtgcaatacaccagagccctctccttgttagaacttcaatggttactctcattgagaagaggatggcactcgagatggggcaattttctggttttcttcattcacaaaacacaaagccataccttcccgagggaggttggatacatatatataaccatagctggctgcaagcctattgctgcaccctcctagtctaaaaattcaaaatttgaatgggatgctatcctagagggcatccaaactgaataaagcataaaggaggcataaaggagatgctaattgttgctgtcctactaaccgcagctgtcctagcaactgaaaatatgctaaaggagtagatgctgtcctgaaaaaggtgaaactacccaaaagcaaaaagaagaaatcaggaccaaggaccacaaagacttatccatcattctccccctaagtcttgtgcgtcgtcttgtggggaagttgggccatcccgatcctggaacagagctcgaggaacttgatcctcccaagaggcttggtgagcaagtccgcaagctggtccttggtgttgatgtagctcgccttgatgctcccttcctccaagtagcttcggatgaagtggtacctcacccggatgtgcttgctctgttcgtgaaaaacggggttctttgccaaggccagagcggacttgctatccaccctgagctccaccgctccagtgtctctgccgaggagatcactaagcagtcgagcaagccagagcgcctgggtcgaagcggcgaaggccgccatgtactcggcctcgcagctggacagggccaccacctgctgcttgaccgactgctagctaacgaggcactcgccgaggaagaagagaatcccgctcgtgctcttgctggtgtcgatgtcgccggcgtggttgctgtcgctgtacccgatgaagtgtgccttgccaggacacctcgggtagtagagaccgtggtcgagagtccccgcaacgtagcggatgatcctcttcacagcctgctggtgctccgtcgtcggtcgctgcatgaaccgactgacgtagccgacggagaaggccaagtccggccgtgtgtgggtgaggtagcgaaggctccccacaagatgccggtactgtgtagcatccacttcctccgtcgtgctatcgcggctcagctttagtctctcctccatcggagtgagagctgggttgcaatcggtgagcccagccagctcaacgatgcgcttggcgtaggcggtctgtcaaagcgtgatcccggagtcgtcctggtgcacctcgatccccatgtagaaggagagaggcccgagatcactcatctggaaggtggccttcatctcctccttgaacgccgcgacctccgcatccttggtgccggtgatcaccaagtcgtcgacgtagacacccaccagcaaggcatttcctccattgccccgccggtagatggccgcctcgcgcgggctttactcgaagcccatccccttgagtgtggaatccaacttggcattccacgccctcggtgcctgccgcaagccatagagggccttgtgcaggcgtagcaccttgccctccttgccagggatcacaaatcccggcggctggtgcacgtagacctcctccttcaagtcgccgttcagaaacgccgacttgacgtccatgtgatggacgccccagccttcctgagtagccagcgcaaggagtcgcacggactccatccgtgccacgggagcgaaggcatcgtcgtagtcgatcccctcttgctgcacgaaaccgcgtgccaccaagcgagccttgtgcttgacgatggctccggcttcatccctcttcagcttgaacacccacttaagggtgatcgtgcggtgaccacgagggaggtcaacaagctcccaggtgcggttctcctgaaccgcgtccatctccgactgcatcgcggcacgccatgccgcgtgtttctcggcctctgcaaaagaccgaggctcaccgtcgtcgcacgcaaggtgtaactgcgcctccaggtcgcgaggcaccagtcccggcaccggctggtcgccgagaagatcctccatcgtacggtaccgtagctgctcgccgtcgtggtatgcgtcgatgcgctccccgtcgtgggagagcggagtagcgaactccaccgggctgcgctcaacacgagctggcgtctgagtatacgtgcctggaggagtggctgttggtgctggagtgcgtggggtcaccggctggggtggtgtcggcgaagagctcgtcgtagtcgaagtcgtggcccgaggatgtgttgatgtcggagtcggtggaggctcggggactggggtagacacgctcggtgaagaagagctgcctactcccccagctccctcgaagtggacgtactcgatggtgaagtcgtcgtacgtcggagtcgaaccatcgtccaccgccttgtcccatacccaccctcgcccttcgtcgaacactacgtcgcgcgctgtgcgcacacgatgtgtctccgggtcgaggatgcggtaggccttcgagccctccgcgtagccgatgaacacccctggggtgctcctgtcgtcgagcttgccgatgtggccaagctccttggcgaacgcgaggtagccgaagacccgcaggtgggagaccgccggcttgcgcccatgccatgcctcgtacggtgtcctgccatcgagggtcttggtaggagagcggttgaggatatagacggccgtcaccaccgcctctccccagaagatggccggcatccccctctgcttgaggagagcccgagccatccccaccaccgtctggttgcgccgctcgacgacgtcgttctgctgcgggctgtacggcgcgatgtagtggcgctgaatgccctcatcagcgcagtacgaagcaaattcagccgccgtgaattcgccgccgttgtcggtgcgcagcacgcgcagcttgcggccacactccgcctctgcagcagcctgcgcgcgcctgatggcgtccgcagcctctcccttgctgtcgaggaccatcacccacatgtagcgggagaggtcgtcgacgagcagcaggaagtaacgtcgtcctcctggtgtggccggtgtcactgggccacacaagtccccgtgcacgagctcgagccgctccttggctcggaagctcgtctgctggggaaaggggagtcgccgttgcttcgttaccacgcagacgtcgcagagttgctccacgtggtcaaggcacggcatgcctcgcaccatctccttggcattgagccgcttcaacgcctcgaagtggaggtgcccgaagcgctcgtgccactgccacgcctcatcgtctcgacgagcggcgaggcaaactggttgtgcaacctgcgcgctgaggatgtagagtcgattagtgcctctggttaccttggcaagaaggcgacgacggcgatcccaaatcctcatgagaccgtcctcgaccaacacgcgtgagccgttctcatccagctgtcccacgctgatgatagaattcctcaacgcggggatgtagtagactccggtgagcaacctgtgctcaccggacttggcggtgaaggtgacggagccaacgcccttgatctccacgccggaggcgtccccaaacttgacggagcctcggacgctggagtcgaactcggtgaagaactcccgtcggccggtcatgtgatgggtggcgccggtgtcgaggtaccacccatcagccttgtcgttgctagagccgttgcagagggagacgagtaccttcggctcatcaaggtggagaaaaactgctgcggccggtgccgttggaggtagctcgatgcttgcgtgagccaggagcagagccggctcttcctcctccacacgtgcgacgtgggcctggccgcgtcgtggctgtcgacagtctttggcccaatggccaagcttgccacagttgcggtaggcgtcgtctcgtgccggcttgtggttgccggtggcgccgccttgggcgcctctgcgggcgccaccctcggcacgtcttcgcgcccaccgtagctggacacctccccgcaccttgcgcagcttacggccgcctgtcggggaagatgactcccccttcctcccgtcaccctgagaggcctcccactggtcccgagtgagatggagcttcccgccaatggtgataggccccgagagaggctgtggctcatcaccgtcgacgaccttgaggcgacctaacgcctcctcgatcgacatcgtggagaggtccagctgagactcgatcgagcgagcgatctgcctgtacttctctggaacgcagcggaagagcttctcgacagctctctcctcgtcgtaggtgtcgtcgctgtactgcaccatcttctacaagagagtgttgagacggagggcaaagtcatcctaacctggcttgaaggccatgttctcccactccttgcggagtgcctgcagtgtggacttgcgggcgcggtcactgcagatgcgtgccgcagcgatggcatcccaggcctccttggcagtccgcttctgggaaagcgagaactgcatctcgggcgggactgtagcgatgagggcatccagtgcccgccgatcctcgtcgtagtcgacgtcgccgtaccatactgcctcccacatgtgccgcacctggagcctcaccctcatcaccgcggcccactcgatgtagttggttttggtgagggtaggccacccaccgccgggaccaaagtccctgaccaccgtctggacgccgtggtggccatggcgccggtcaagggagagagagtcacgctgcctgcgagggcagcgcgcgggctccgtgctgccgccgacacgcccgcgcccatctgggttcccgtcagcgggcgcacggtccctttggccgccgccgccgccgtggaggtgggctgctgcccaccgctctgcccgctcccgtgcccttcctcttgctagctcctcaagctccctgtcggcggtgatgtcgccggcgatggagccattgatgctgctgcgcaaggtctcaacctctacctccgccgcacgtgccgcatcttccgccacctctgcttccgcctccgccctggctgctgccaactccgctgccgccagtctagccgccctcgctgctgctgcagcggtctgagccgttgctcgcctgcgctcttctgctgcggcgagctcggcgtcctgctgacgccgagtgctcgaggcaaccgaacgtcggaaatggcgcacctccggggggctgctgcgtggagaggggggagggaaaggggaaggaggagcagccggtgctgctgctggctgagagctcaaccgagcttgggaaggggtggaacaagagatgtttagcctataggaaagtgtggctctgataccagatgttagaacttcaatggttactctcattgagaagaggatggcactcgagatggggcaattttctggttttcttcattcacaaaacacaaagccataccttcccgagggaggttggatacatatatatataaccatagctggctgcaagcctattgctgcaccctcctagtctaaaaattcgaaatttgaataggatgctgtcctagagggcatccaaactgaataaagcataaaggaggcataaaggagatgctaattgctgttgtcctactaactgcagctgtcctagcaactgaaaatatgctaaaggagtagatgatgtcctgaaaaaggtgaaactacccaaaagcaaaaagaagaaatcaggaccaaggaccacaaagacttatccatcactcctaaccatctgcattccacattactgcgtcaaatagaaatcggtaatatctctttcttttcttgcgtcaaatagatcaactcatacataatgtgttgaatgcgtcactgagcctatcaaggtagctggaaccacttttgtgttgatacaccatgggaaaatcacgtgcaaaaaagtttattttataacatgtggattgagaaaatgcaactaaataagatgacacttgcaagagagcagatgaactgatgagtgcacaggatcacaaataaagaagtaacatcctgttcagccctcctgagtacctcaaatgaagtgattataaaatactgaaataggcccacattgcaagtcaacttgccagacaaaaactagataagattaacacatgattccaaataacgccacacgtactaagaaaagggtattcaaattccgaatctaacatgccattccgttgtacataaaacagtgtactatttcctgatttgaaaccaaccagatacgagaatgtgagaatacctcgttgctgagcgaaactgctgttatcccccaaatcgagcaggagctgcacaatctcatacgagaccttctgcttcaactccagtggcaactccttccgcctcttctcctcccgcctgaaaatcttccgcagattcttcacctttggcaccaaaagctttcgaggattagtcgattagatcacaagtattgtgaaaatattttacaacaagatttctggttaataccgcctcgacaagctcgacgggctccgcctcgcggcgaatccggatcgactcctccgccttcctaatctgctcctccgtatactccaccacttcctcacctagaaacaagagttcgatacagcgcacgaatcagatcgaataaacccaaggaccaaggtgcagagatggcgacgcgagattcagctcacgtttgggcggtgtgggggcgagggaggtgagggagcggagcacgaggagcgcggcgacgaggttcccgaggcagacggctaccgtgatgcgccggtacgagcaccacctcgcggtcgcggcgcggccaccgaacgacgccgcgcgcgctacgcccctcgccatactcccgcctccgccgccgccgccgccgccatccctaccgcctcccacgcggcattgcgctctgctgctccaacggtctcccgtcgatcgatcccccgagctccctcgcctcgatctcccctcccgcgagcaccccgagcagacgcgcgtcgagggcggcggctgctactactgtgctactagaagcttctggaatccggggacgcctccgctttcgtttctgcgcgagggggtcttccctttttccgcatatggaagtgctgtgcagagggaatttgggagcggttgggccggtagggcgaatcaactcaacccccacgacttcttcaaaggcctcccacctcactgacatatggggaccacaatcgtgggtcccatatgtcagtggaacgaaggggggcccaccgactgcgtgtaggtcgcgctggtgtgaccggttggacgattttgccgtggtcggcgagggattacaccgaacagattagtttatatataatcttaaagttagcctaaagcagttgtgattagagaatcatcataggcatataagacagtaaaataattagtgttctattgtactgcaggttgattaatttcagggtgtttgtttggcacaacttcaatttcaactttacttttttttttagagttggagtctagctaaacaattttaacttcacttaaaattaaagtggagtaggtaaaactaaagaggtggaattagatttatactgctccacaactttactttaaacctaacttctatagataaatttagaagttagagttttactaaacagatccatatagtaagaaaaagaatggaataaacaaaatctggtatagcagagacagagtttcgggctcgccgtcgctgtggaagtagaacaaggcaggcagtctttcaaattttgattgacgaaacaaccaattatatcaagctaataatcgatggaagaaaagtgttgattaagcaaagcggtacttcgccagcaaatgaggcaaaacgtgcctttcggcaatcccaagcagccaaccacggtacttgcaagtttcagccaccaaacaacctgattgctttggaaccaaacaacaaatggacttctaaaaccaattttactcaaaatttttgtaggttatcttagtaatatgagtttacattagggtttggaacttcaagttggatcatttgtccaaaaaaatgtaggattccatctccagccagccacttatagaaatagaatcactgtcattactcgcctctaatcctcgtccgcccttaacactgcgtcagtatctccgcgccatcctctgtaatcagtattgtgtgctcaaactgtgctgacaagctgccgtcttcagtcaccgctgtccagtcatcggaccatataactggatttacgctccccacggttagcatgggctctaataaaaaaaagaatggggaggttgtcagctttacatgcttcacgaaaaaacttcagaagacaatagtctaagacatgatatcatcatttctaagtgttccagggcttcttgctagcaaatcaacagaaattaattggtaaattactcctgcatagtagttgcatcagtttcagcttaagtatcattgtttgaatttatgtgcacaatagatttcggagaataggtatagttataattatacgtgtcacagtcacaagttggtagaaaaaataaccatgctatgtgcacattggaaacatgtacctatagtaaatgtttggttcaatgtcatacggccccattcattgtttcctgcaaatttcgaaaccgtcatcagtccatggcatgcaaatcatgtctctaagctgatacagaggagcaaactgcaacaacaaagtatcatctgttgaaggggtctctagccttttatggtttgttaagtgactggaatatatgctacaagctcaaaactatggatagaattgagtaagagatgttccatcaaagtgaaggactcacggaaatgaagcaccacaggttcagcatgaaacacttgtccaaccccatgaccgacgaactgtcgaactacaccaaacttgaatttatctgcatggtccctatgaagatcggaaatcctcagcaagttaacttcaaagcaaggatcaatataccctactggtgcattactgaaagtctacagcggtgacaggagtccaatttaatcatcaaaatgcatcgtctagcaaaatcagtgtatcaatgcatcggaaactagcatgggaaatccatttgtatatcggtcaatttcaatgaaacacttaaaatggttaaccaggaaataatttttatatgtaataatactataatatacatgcatcctttaagtatgcaatggattacaagaaattaatagcaactcttacattggtcatcaccaaaattcaagaaattggattctatcagggaagtttctgtggtagataccacataaatagaggtgttggtttctaaattctaattgcagaagctttctcaaaagaaattggaatgtaaaatccaatatttcagcatcagttcatatagaaaatcaacagaacatcttctcgtttacgtactgtatagttcgaccaatacgtttgatctccaccccaggggcgcagattgatatagccttgtcgagacattctcttgttacctgtttgacgaaaaaaaaatctaaactctgaacatgaagcaatgattatctattactgtagctgctttgactgaaactttcatgagctttgcccctgaatttgtggatgaattaaaaaaataacttggtatagcattgttcatctatgagatttcataggttagaaatgaactacattccaaactgcatgagaacgggttttcagtcgtatagtactttactgcttaattgttaaaactaaacatttgttgagaacttgaggtcacctgaactaatttcttagctttgtcatcaacattaccacatagaaatgtagcagatgtatcaccgtggtaaccctggaaccaaatacatgagtacaatatatatatgcactggagggaaaaaaatcagaaagtgactgtagtcaaagcaatatactaataatgaaccacacagtagacatgtaaccatatcaataactgtacatagacagatgggactaagaatacacataaaaattccatgccttatctcgaccatgggttgcacaaatcctaaaccaagtgaagggtaagtaatcaccagctgtccagccaccattgtcatactttgacatttatgcaaatataaggaggagatgcatagaaacactctctgaaaagaaaaggaaaggctagttgtttgtgtatgaccatgtaagaaaccactactaaaagaaaatatcctcgagaatatcatcgcaatcgaccagaaatagcaatatcatcacaatccaccagaaaaagcaaaatattataacaatctactattaaataagcactgcggttgcttcccttcacccttattgttgttagcaaaggaagcactgcagtatcaaagcaattaagggtaatagttttgggtgatctacacattgatgtttgacttacattgagataaacagtaacatcaatgttgataatgtcaccatcctgtaacaaaggaggtcaatttgtaactttcttatatgtatgcagtatgtgtgtgttatctccaattttggatggcttacttcaagaggacgagaatcaggtataccatgacagatgcactcattcactgaggtgcagacactctttggaaaaccgcaataaccaagtggcgaagggtatgctccattatctactatcatttggtgcaccgctttatcaatctcatcagttgttatgcctggctgtcaataagaacaaatcagtctttgacacttgagttttatacatccctagagtatggtaagtctgagaaacaagcagagacatatatcagatgaaaagaatatcaattttcttagttaagcactacatgcttacttatgtactacagacatacaacacagcaagaaacactcggaagacattgcccctgcagaggaagcaggtacaatattaagaaaaacgggcacctctacttcaggaaatactttataggtctaaaaatgtacttacttctctcctgcaccttaacagttaccaaaggaattattttcccccaaaaggtacactgttttttcaatacggaacgggatgaagtttccctaatgttaataatgttcaatcaattcaaaagttagaatataaaatttttagtaataatagcattacctctacaagagtcccggcaaacttcaaaacttgtgcagcaagctttccagaagccctcatgcattcgatccctctctcatcatgtatttcaggtccattgtgcaatccaggtctttgacgagcattgacatatggtggccgctgtatatgtttgggaacgcttagacgaggagatactttcccaggccgtaggcgtctagggttatcttccggtttgtcactctgacctctgcaagattacaatgaaataattaactttctgttcaccagcatttatgttgggtcctggtgcccagtgtttccaaaataactcaatacagattattctaataaaatatgcagcacacaaccaaatgatcaatcatcaatattatcagatcctgaatttctgttgacgtgcactaatatacatggcgttttttcgagatttgcgtttccaagatctctgttcctccccaaaatagcagcaaccacaccaatgtgcggtaattaatctgactagttgttcacagtgtcaccaccaaggaagtagggactatatgttaaattgttaattgctcaaagaaaactagcaccaactatccaaccactaataaactatggattaattcgaaggacacttcatagcaaataaaatgctgcaattatgctgcaattacccaacaaactggtgtgtgctgaaaatggtgatcctaggcggcttggctcacctgttgaagaggatatccaccaggttgcagagcgttctcgtcgcctgatacgcggcccgcctgcttcctgcaaaaagagagcccacccggagccggagcagcctcagtaaactcttgcccgccgctaacgcgctggggcagcggaggcagtcgcgattcgcgaggtggagggagtgcgcgccgcgcgcgcggagttgcgagagaagaatgggggaagggcgcctacctggagcggccccgcggaggagcggcctggcgctggcggagaggaggcggtcgccgaggaaggaggagagcaggcgcggcgacgacgaggtcgccatgggggcgagctgagcggaagggactccctgactgcgtgtgtgtgtggcttggggcgaggcggtgtgaatctgtggcggccgcggcgcaggtaaactggtcgcgcgccgttggtggtggaccgtcctggtggccggtggcgttcgtttcttctccgaaaaagtccatattgagtccctcaactatacaccgagtttaatggaattagtctacatttctcgaacgcgcacaagaattacacgtcaaaatagaataagtctacataaacacaccaactatcactggttgattacttaaccccctcaactattaaaccatatgtatcagaccctcctcatctttctaataccgtttaattaacccctaaggtggtttagttgatcagtgattgcacgtgaagagatattttctggcttacattgagggaaagggattgggagtttacacgagggaatcgatggtgagattaaaatgtgaatttgatttttaatcccaatatcttttttggtagaggtggtggaagttgatagggagtttagttggagattaggtcattaataaaaacggatgaccgatatttgtttaggaaagtaatggaggaattctcttccaattaccaccccctacccaggtattgaaaatgagggagttcatttctcagttccccatcccatcacatcaaaattcccatgtctcttaaccaaacaaaacagttaataacctcatccttctaaactcctaatccctcttaaaaacttcctccaactaaaggggccgtgaaatgccaatacatgtgcatttagcagaggtttttgtattacagttttgagtgatatgagagtgccagcattttctttttggtgtccatactccaataatttgatccattataattgcgcacatctaatgtatgaggtggtcatctgccgctgtggttacctgaatcaaaatatggaccattgttttcttttctttgaataacttggcgctccaaaaactgttgttcagaagtatcatcaaacaggacgtaatagttatgatgctaatctaagattaataatatctgctgaaggcctttcacacttcacctccttcgtcagtgattaccaacaactaaaggtccctcatcagtgattaccagctcgcggaacgcattacttccggcataaggcgccttaaaggcttgaaccatcacattcatatgctattcaagctaatggagagttctcgtcctctcccaaacaattcatgttcgggtagatccttagttatgaggtttttatctgtgtgccattagaaaagatgaccactgtttctgtgccactaaaaagttcgagcctctcctctataccatcgtggaactttatcacgcccttcacaccattccgtccatttttatcctaacggtgtcaaatggcgtagccaaatgacgttgttggccttagtgttgagagagaagagagaagagacagagagagagccgggacaggggcgccaccgacgaagagcgccgggacggcgacggccgcggacgccacggcctcctcggcggcccccatggcggcgaggagccggcgcatcccgacgacgacccccttgagtcagcccctggccgcaccgcgcagcgccgcctcggctagccgttcggcgcgaccgtcagccaccgtgcccctccttcttcctcctcctcctccgccgccattgccgccgcgcccctccttcttcctcctcctcctcctccgccgccgccgccaccggggaaggggtggactgggaagccatggatctctctctcctttctctcgagctgtggcagccgatgattgcgagccgcgccggccggccgctcccctcggctttcaggcaaagcggcggcgtcccccgtcccgcgccccgccgtcgctgccgccgccgctcctctcgccgagccgccgccgctcctcctcgccgagacaacgcgcggcgcgcgagaggctgccttctccccgccgagctcgaccctgccacggcggtgctcaaccctgccaccgccgccgtcgacgcaggtgacgtcggaccagcccgccgcgccctcgccgtgcccgccgccggctgccgaccaccgctgctcttgactgtggtaagaaagaggaagagggaagagggagaagagagaggtgagagagtatgacaggtggggcccgtgactgaaagggcaagagtgacatttttcctgcccgggcctacatgtcagagctgccaaacggttagaccctaacagaatagcaacggaatggtgtggaggacgcgataaagttcgacgatggtatagagggaggcccaaactttttactggcacagaggtaggggtcatcttttttaatggcacacaggtaaaaacctccttagttattacttaaacatcctctaagcctactaacattctctaagcctattatatgctacttgcgctgtcccaggatgtcaaataccggctgcgtgcgcctctaattgtgcagcctcactccaaccggttaatcttttgaaccattttaaaaaagatagatgcaatacatggtatacccacagagaaatactgtcaaccaggaccactttctacaaaaaaaatagagagcatcaattattccaagtgatcatttaatttaacagtacgttattacagtttttgacaatacaccaggaggggcagaagcagcactccatttatgcgccgaattctcgtacagacacacacacacagagagattcacacagtcaattcagtccttgagatgagaataccatcagtatcggcgtagagccactccccgtcgcaaatcctggtccctgcaatggtcacaggcacatgcttctccccgatgcccttcttgtttgctttcatagggtgcgagttcagagctcggacaccaatgtcgcagccattgatctcatccacgtccctgatgcaaccattgacgacgatgccagcccacccattgttctgcgcctgctgcacagggttgccacccaaaatggcgcaccgcaggctcccaccaccatcgaccacgagaaccctgccttggcccttctcctccaggaactcgcgaacaagaacattgtcctcgtagaccttcagcgtcacgatagggccggcgaaaacctgccgccttccgtagacttggaagacgggctggagagcacgaagctcgccattcatgatcaaatgtgcatttgcatcacataattcggctgtggctaatggcaaggcagccatattggattcggttctgctgtcattagaggaggggaaacattattgagcaagaagtggcttaagaagtaaggctgctcaataaatattcagcaatataagttttatactattaggcactaacaacaaaaacattttaaggaagcacacattgtacttgtaatacagcaaatgaggaatgctttaactgtaaccctgtttttcatgcgtgatctcaacgatgtactctaaacagaggaaaaatgttgagactccattcaacaaacaatgggagattctccatgactaaactttataaggagcgcaactagagaacttttttcctttttatcaacgcaaggaacaaaatgttaagaaactcagctgtccatcttccacagaacacctaaaccgccaaaccaatcttgttgagaaatgctaacatgcttttaactgaacaaaaaaactaaaagcaaaagtaagtttaagaatgtgatctaacatgcaatttccatagcggtcatcttatatcatctatcacacacacacacacacacacaacctatgtcatacaataagtaatcaaggtgtatcaagttacaaatgctctaagcagcaagcgcagaaaaaaaaaagagcagctaatccagccagctatggaacaaaagataaactcagtatcataattgccatttcccctgtaataaaagcacttaacaaggagggataaaggtttgctgttgacaggtccaaccataccgacaacgcaacatgagacgataccatattggtaaggctataagatgatcaatattaaatctggttttctttattcgatactaaatctgatttggtttatcgcttagcacgacatggcactccaatagcataccaacaaatcaagaaccaccctatgttttatttccatccagtaagtataaaaatgccacaaatcaattagaacatgccaaagcaaggaacaaacaacagggaacggaacacgcggactcctgaacttccaccgatcacgcagaacgattaggcgaacgggcacggctaggacagcaggaacaggaagagggcggaccgagcggcaagaacgatttccttacctcgctcgcggccgcgggagagggttgcgcggggtcggatcggcggcgatctggccgggccaatcgggtgagggatccgattgggggtggtggttggctcgatctggatcactggttgggatggtatttgtgaagatggggaggagcggaggaggggaggtagccggcggcggagggcaccgaataacccaccacccgctgcgtccgcgtgggcgtgggcgtgggcgtgcgcaagacgtgattccaggcagcagcgtcagcgtgagcgtctcctcatgcccgcggcgtcgtgcgaatgtcggggaagaatcctctgagctttttgcgcataggcccctgcatttccctcgtatctcgcagcttccaaattccatctcaaatctagccaaattcactcaagatacaaaccaagctgattcaaaacatgaggtagccgtaataccagtgattgaattgaatcgcagtttgcgcaataccatctattaatgatcctcccggggggggggggggggggcggtgatcggctgatcgccatccagaaagacgattaattaatctttttaaacacatgaacatgattaattgatatcgcagtagtagacaattgatcggcatcacgacgggacccactcatcaacgtcacggtggaacaaaggatggaaaacgaccaaacatacaagcaaacaacattacactacttgttattcaggctagcagagtgccaataattgagtttaacggattactgtcccacgtgtacatcctaggggtcgagaggtgcaatgcagagcaacgaacaatgcaaatagttggttcgagcagcagattgtttgctagagcagctgcgatatgagtgggatcaacgaaatgtatctgccagtgactgataaacttttacatgcaacgtcggtggcggagcccgagtgaccgctcgaccaatccgatagctgacttccatctcccaggcttattttgaggtgttcttgaacccatgtttatgaaactctgtttaagattatgaaaataaaaaataacctagtctaatctaaacatattacattgggggaatactctgactacgccaatacatcaagtagcattgctcaccaaatttttcattgcgacgacttggaccccccccccccacccgtcgtgcaacagagtggcacggtcagctccaccaaccctactgcaaccgctctctcttctccagtggtgaaactaggaatatcatgaaacctgggcaaaacctaacatctaacgagaaccgctaattaaccacatatttataaaaaacaaaactatatttttattatagaagtggactattaggatgctgtctcctacgttgatgcttcgtcggcaatcaagtgcatgcacaaattaagacgatccatggaaagcgcatgcatacaaaagcaaaaatcaagcaccctgcatctatttgctccttgcgtcaaatatgaaacaatcagatgaggtgattaaccggcctattttgcctgagaaaccagcaaattgatgtggaaaaatcgctcgatctcgatggagcgcatgttgagcctgggcaactgcccgccctagccgagcggtgaatccgccattgctcttctctcttcctgtatatgctacaaccagagaaccaccggaaaacgacaagcaacgatgatggtagcggcggggccacctaacaatgagagcagcggtggcgatggcaataatgaggttatagcgacggtaggcacgatggcagtgtccagtgccaatggggacggtcaaatccaacgccccatggctagttttgatattcctcaaccagatctagcgacaacactgatgggtgtgccatgactgcagtggcaagcccatccatggcagtggcagctgcgaggtgtttgcaacgatggtggcttgtccacggtggtggaagcaacgagtagtggtgatggcaagctcatcagcagtggtgcattcatgtctacaaccaactgcaatgggacgacatatttcggctcctcatggctagatccgcccttccttcgacctaatctagtgacggcgttgacaagagtgccatggatggcgatagtaggcttgggaacatgacgctgggctaggcttgaaggtgcggctggcaacaaggacagtcagatcatgcatctcatggctagatccgaccttcctcagttgtatctggcggcatcactttctatctgaaagtgtagtttagaagaccccgttatcacctaatctgcttccagacagtttttcttcggagttacatgcttgtaaaaatcacactatctagcgcaattcgttttattttttaaataaaaagaaaaatctaatgctagccctctttggtctccttcctgaattgtacgttgttcacataagtatagctcgaacgagggtcttttttctagaggcccttgtttgcaacagagcatttgacgggaatatttattttagaggaaatgaacggttccctatgttctaaaggagacttagggtgtgtttagctcacgaaaagaaaattttagggtgtcacgtcggatgtttgaccggatgtcggaaggggtttccggacacgaatgaaaaaactaatttcataactctcctagaaaccgctagacaaatcttttaagcctaattaagccggcattagcacatatggggttactgtagcacttatgactaattatggactaattaggctcaaaagattcgtctcgcaatttctatgcaaactctgcaattagttttcgttttttatctatatttaatacttcatgcatgtgtcaaagattcgatatgtatattttgggaaaaaaaattgggaactaaaccaggccttaacgttgaaaatccttaaggcagtagaattgggagaggcttgggcaaaaggaacctggctgcagcattacatttatttttagatacaacacaaggaggagggcataatcaattaatcatcaccccttttatgcaccaactactcgtacgtacagatcgacacattcaggaacttcacacagtcaattcagtcctcgagatgagaatgccatcagcatcagcgtagagccactcgccgtcgcaaatcctggtcccttcaatggtcacaggcacacgcttctcaccggcgcccttcttccccgacttcatagggtgcgaattgagagcacggacaccaacgtcacagccattgatctcatccacatccctgatgcagccattgacgacgatgccgacccatccattgatctgcgccagctgcgcgaggttgccgcccaagagggcgcagcgcacgctaccaccgccgtcgacgacgagcacccggccatgtcccttctcctggaggagctcgcggaccagcacgttgtcctcgaacaccttcaccgtcgcgactgggccggcgaaaacctgccgcctcccgtagattttgaagatgggagggagggcgcggagctcgccggcgatgattggatttgagtttgcgtcgcacacttcggcggtggctaatggcagcgcggccatattggcttcaatgctgttgtcatcagaggagaaatatattcaagagtcaagacgtagatctgctcaacattcaacagtaaagatattgggctgttcactttattatcattttcaactctaccaattttcggtgttatcaaaaaaaaattgtaaggtaacaaactaaacatattcttaccctctctaatttaccaaaatttgaaagttccagaagttccctctcataaagtcactactaaaattttaaaaaaatcacaaactaaacacatccaacgctaccaaagttggttgtgccaaatgttggtaaggttgattttggtaataaagtgaacaaaccctttttggatagtttctgtaaaacattaacggaataattaactgtttgccactcttacgagcggtgataaagaatttgtcactaaattcatatgtcataaacacatgagggcccacgtgtcatagacagtgagtgacaattgccacatcttaaaggtggcaaaaagttaaatatcccaagattaacagcgtaacatttcaaagaaatgcacatttgaacttatagtacagcaaacaaggaagattaaatatgacatgcttaattaattgtattgttctacactgtttgtcatgcctggtcgatctcagggatgtactttaaacagacagaaaaatgttgagatttcattagacaaacaattggaaatttccatgacttgcttctaaggagaatagctagagaaacttgttcttgttatcactccatggaacaaaaagtaacgaaacaggggtattctacaggacgtgtgaatcaccaaaagcatccttcctcgacagagaaacgttagcataatgctttagctgaaggaaaaaataactaaatctgatctagcatgacaattcctttataggagaaatatgattctgttcattgctcaataaggaaaggcacctcaatggtacaccaacaaatcaagagctactttgtgctttcttctcatcaggaacaagtataaaagattcaacacaacaactagcgttcattttttttcccttcaagcagcaggactcgtagtagttttggtttctgaacatgccagataaaaaaaaagaagagaaaaaatcagagaaatttgtcatcaaaagccttcggaattcgcgcgcggaacagcacaagaacatctctccacacagaaacacactaacctcgcgtgccgctagctagaaaagggggccggatggagtgtcaagaggaagacgaaggcacacctctttatctcgcgggagagagcagtggttgggagttgggacttcggattcgatttcagtggtcggctcgtccggatgagacgatagttgcttattcacacccgccgatgcgccgcctaacacacactcaaaacaaacggaggcatctgatatcgtctcatccgtttggaccgtttgtgaaataatgatgtcatttggacccaacttaataaagaaaccccctaaaataagttttacaataaacgagaaaactggggatacctgttttcagtcccatcctggaaaccaggtattcgatcaacatcatcacaaaagctaaaacaagtcagacaaacatgaacctggaaaccaggtccgtctttcgcttgggtgaaaaagaaacctagaaacggaaaagaacttcactgtccatcctgctactagattagaacataaggtgtttccgaattcagatttcagcaggaagcaagcaatcagcagtgggacgtagaatcttcagatggtccaggatcttgacacacgactatagtagccaaacgcccaactcatcgacgccataaatcaggagtagactcggtcactgtggaacaatggcgtaaacaaccagtgctacaagcatgaagcatgtacatcagaatatcagattctttcagcaccaagcctcaagttcagcaaaacaccattgcacatgctattcaggcagtagcacaataacaacagagttgtgctgattactgtgccatgtaatacatccatcacaggggtcgacaggtgcaatgcaatgcaagggaataacaagcgaagatgcaggtaactgagttgagtatgtagctggttgcttgctagctatgccggctgcgaggcgcgagcacgcgccgctgctgccctctccaaggccctgagccggtttgcctccatgcgcgccctctgctcttcggtcagctgaatcttgcccggttggttctgcgcttctcgtggtggatcatcttgtggtttcgcttcctttggagccatggccggtgtggtttcctcggctgttcctccaacagctgggatttgtggctcctgtagtgtcatcggaggttcagagatcacagttttaccacagattcttcagttgcgtagccactagaaagatatgcaaaattgaaatggctgtaaccaccatgacttacatcagcttccttattgtagatttcattaaggagatcttcttgcatgggatccacatcgttgctttcgaccggtatgtctatatcttcttgcacctggtccacgccatggttttcggtcgccggaacttcagtcccaaaaattgggtcttcagctgtggctccatctgcaacagatagtgagcaaattgattgctgtcagtggaatgctggaaagaaagattagcaacaaaaacaacgcatttctatcaagatctaaatatctgtgttgtaaacaaaacaacaaactcagacctggttcgccctctgggatgacttcgaccggcggttcatgcagtagggtaggatctccccctctggcaaccctgtccctcagttcagaaacgcatctctacaaaaggaagaaaatgaagtacatacataggtcaggagacaaatgttgggacatggaaatactaaacgaaaaaaaggagcatttatggtgtgacaaagatgattctgccttttacaaaaagattacagctttctaaacttaaatttcacttcttgagttcaagagtgaaaaatcaatacgatggaactgaaatcctcttttgtttttaatttagttagcaatgggtatttgtggagttcttgtgaagtaagagaatactgtcagaaactctgcattttattccccatggaaactatactacagcctatttgtggaggtggattttcatccctcgaggggatatcccctcgtttcatgcatgttgtctaaaagtcataaaaaaaattgaaaaaaagtgactagatagatcaacatgttatcacctcagaaacatgcaaattaaaattcaacttgtacaagtagaaacaaaaataaaaaatttcaatgcaaatagtacactctattcacaatcaaatttgttattttttgtttctacttctgtatgttgaatttgaatttgcctgtttgtggaatgaaatattttcctcagcctatagattgacaagaaaggacttccctaaacaggcaaggtgcagtaaggaatacaataatatttttttcccacgaactgttgtattttatgacatctccatgtagatgtgattctaggttcttttgcttgccctcattttctttggcgtatgaaagtagtcctccaagatatttcaaaagccatattacccccattctaattgtgaaatgagcatgctagtggtggagtaataaacaatcctggaactttttttttctcccgcaatatttggatggcctctccttcagccatcccggcttaaaaaaatcctggtgttagcatcccatatggagtacaatttaaaactgtgctttatggatacttctttttcccatgaaataaaataggtgataaactctgttaaaaaagaaccaggtgatgaattaagactgccccaattttcagttgagcacacccgctagtctgcacacttttacttataatcacatgaaagagaaacatgaatcagaacaacttaccctaacacggttactagcccccactttctcgacttttcgcacaaactgatcaaaggagtaataaggaatcaagcgagagtgccagtctgtgtatagcttgatcagattaccaagatcctctacctgacacagcaaggcataaactcaatgttaggagatgaaatgaaaatacaatgagcatgtacataagcacaagcatgtttctcatggtccatctgaaattagatttagttatttcacaaaaaatgttatgcatgacatatgcaactttttttgtaagttagatctattgatccggctttgttagaaagccaaaacagagcagagtttttactgatatatgcaacttttgctcaagaattccacaagattttgtttattcaagatataacaaactaaagggatcacatcatcgtgccagcacaaaataagggctccagttggctctagagagtagaaaaaaaatattgcagatcagtactggcactgtgtttttgccaagtaatcactgcacttgaaacaagaaccaccctttggctcattgactagtttgaaacgacccaccgactgcaccaaactaaaaagactcaaatattagggaaggacctaatatcaaataattagaaggggtgaggctttgaacccagatcgtctagcccaccaccttgtggagctagccggaagacccccgggcatttctcgactgcaccaaactacgatgattaattaatgattaacaattgctgtaatctgttaaattctccctgggcaaacatgcaatctctttgtgcaagaatggtccaaatttgaatagaaacaccattttcctttgagaatatatctgataaaagttagtatcgcgtggccacaccaaaacctctgctcatccggtcgtagtagaattctgaaatcaataacaaaagggtggcgcaagggagacgataatacctcgtggccggggcgggcgcggggtttgaaggccttggggaagtagcggaggacgaagccaaggccgtcatcggagagcagcaagtccggagtgagcttgggccgcgtcgccctctccttcttcttcttcttaccctgcgcctggccgccactcccgtcctccccttctgccgccgccgccgccgcggcactcttcccgaacctcggcctcgggtaaggggcgaagcgggaggcgctgggtttggggttggggttagggttagggttgtcggtggatgcagcgccggcgccggcgggctcggaggggcagtcgcgggaccagtggcccggacggccgcacttgtagcagccggtgggcaccgccgccgccatggattgccaagagacggcgagatgggacgatggataatggattggatcggggaggagtgattgagaattatttggcttcgctcctttctgggttttggcgggagagttgtggaggtttggcgccaacttcgtgttttgtggccgtactcagatgtgtttccgcagtctcaccaaaacacagtaaaaattatgtttcatttcggttaaagaaaagtgtttcatttggttccaaacaagactagtaaacatgtttgaaacgaacaaattttgtgagaaccacgcaaggatttcgtagaaaacggtagattttccatcgttccagataggcttaactgtagtgaagttcttgtgcttcaaaatagggacccttggattcaactacagacgggccagcattttcaagaggaagggataaaccaaaccaaaaggcataacgattcgcaccatttggtttcaaacagtacttataaacggataatgtaacaacacgccgccgaccattgtgtcgagcggtgcttctggccttcgcgcatcatgtacagaactacagatgctgtaaaatcagcttgctgatagtttagcaacccatctcacaatcataaatagttagcttgtacaactgaatcatgccaaatgatccaggtgtcgtaaaccaacaatgacatggtaacaaaattacagttgaaatatctagaagtcgaagttcccgtgttttccttgcagactcgatctgttcctctccgaacgtgtggcttgctgctcacagtcaccatcacctccagcaatgcctttggtcctgcctatgcctagttttggtaagcctcgattcaatccgtccagcaagacacatgctttgcataatttctacaaggccagaatttcaacgatgttcagttcagtaaaagcattggaaatcaggggaattcatgccaatcacatcattagctaacaggttccaggtttcttaaatgagtgagcacaatgcagagggcctcagttcagttcatggaatgcacaaaatggattgaactatcatgtgggtgcattattcagacaattcaaagaaacaaactgtgacggcacaaataaactggtataaccgagtgaactgataacctttccctcaaaaagaaaataaaatgacaacctatctaatgtcttagcaaaagcacctctgttattcacttactctaattaacatcagtctcattgagtaaatcagcaaggaggatgtcctaaacaagtcaacaggtaatacatattataccatcactatacctgactagaaatgtagccgcaacgttcacatgttccttgctctggcatccttgttgttgtggagatcctaaaattctcacctgattttatgatgtccagtatagctctaggtctgcaccattcataatttactaagttcaagattaaaaaaaaaacttcagaagcaaggaagaaataggcttctctcttctggatgacaaagcattaccaagaaatgaccaaacacaaatgtaaaaataatgatcattcctttggacaacagaagcctttacctcatcctttccagatctttaataaattcgcgagcaaatccacggtatgcatttggtgaatatatgcctgaattgtgaaatacggaaaaattaaatggatttgatctcaaagtcggtagaagataatactactctcaaaagttcatggcatattacttcaagtatggcagaatttttcttttagcagaattattgctagtgtgtataaaagcatgattggttacagaatgctagtcagtgactgctgaacatctatacataggaaggagtaagaaattacattctgtggagaagtagtccagctttttgaaatatgcatacgtgtcataaggtcaaggataataacataaaagtgcaattgatgaatagagcataatatcacattatatgggatattgcatagtaaggatatataacaatctccttctcgtaggtgtatttgaaaggcttgcatcttgggattggcccatcttcaccagtagttataaaggtacatctacttaacctatatataaagaaaatcagcattaacatcaaccacccaaaaaaaggacaaaggaatgatcagcactaaccgtgcaatatcaccacgtaatatattcaataacacagtttctgcaatgtcatcagcattatgtccagtcacaatcttgtcaacttttaagagagcagcacctcggtccagtgcctacaaaaaaaaaggattggcagtaaagcttaacctataagtagtacaaaaaatgcaccaaagaggcaaggaagaattacctgacgtcgaaaaacaccacaaaaggtacagttattttttaggccaattgctttcacaatatcatccattgtccagccatagaggtccttataggaaactattttcaatggcaggccatactgcaataagtcggttgtatcagcaactgacgaatatgcatttaaatggtaaaagttggtgattaaatgtctgtaaaaaatagaaccaatattaaaaggcaaaagctgcagcagacaggtgttgttgtgttggtggcagaggggaggggaacctgtatttcattccttttaacagtttctagtgagtcgtctctataaccagtaattccttcatccacagataagagaaacaaatcaaggcaatatttgtgacgacgatttaactctgatagcacatatgcgagcacggttgaatctgcataacagtcatggcgtgaaaatatttgagtctgttggaatatcaagagcagaataaagaaagaagcatgcagattatagctgtacatgaataaagaaagtagtcagagttgtataaagaacacatgctatttcattagttagtgatggcacatacaggtgtggaaataccttttccaccagaagctccaatggccacacgatcaccaggtttaaacaaattattgtcaacaatagtctgatggatctcatcctcaaagacaacatagaagcattccctacatatctagaagaaaatgtgtaagcactacctacagctgccaaacaaaaatggtttcgcatttcacagtatccctactgtcacaaaaatataaaaattcctgcttgttaatcttaagctactagagctaaatcattgcacctggattgtctcaaaacatcaggacaaactacattgaaaatgtgaaggacatagaggcacacctgctctaaggttttgggacgcttgagggcggccttccgctcgccgcagcgtgtgcagaggcggctccccgccctagccggaggttgtctcgggccatcaacggcagagtccatgggcaattgtgatggacaaaatattttgctgctggatattatgagttaaaaagaactgtttcatatgaaacgaaataaactgagatgttttaaagtacacatagcagcactaatagttcattctgaagatgtctcttgtagtttcaatggattacataacacctgaataaaagtacaatttaactttgcgtcatggcttggaaagcgatgagtgatgtgatcatctttaatttccacagaaaaaaaaccacgctcaagaaaggtaactatgcaatcttccaaattttatatattgcttgcctatcctttttctttagcttattcttcacatgattcactgaagataacactctttgagaagcttcttcaccggaagacaagttcataactaaggtgcttcttcgtttcaacaagcaagatagaaagttcaatcagattttttttcacttttgaaaacattttatctttacctatatcagtggtggagttgaaaagggaaatgcatcaactctgaactatagacttttttaggatagaactgaacaagcttaaccaaagtccccttgtcctaagcaacagatgattcgtgacttcaaacctactgtcttcttcttttatattttgtcatatttcaagctccacagttgattcaataactaattcagtttgaaataaaaaggggggaaaaaaaagggcaacggattggagaatccgagaagaggattcgtttcagaaaccataccggctggcggcgtggtccgtggaggggatgggtttcaagggctgaccacccggagctcggtgctcggggctccagcctccgcctcccacccttccgccgcgagcccgcgaggcgcgaccggggacagcgtgtcgaggggtcggcgcttcggccgttcggcgtcgatgcttcgggcgtccgggcggcgtcgcggactcgcggttcgggggacggagggcggcttctcggttggacggttggaccggtggaggagtggagcccaaagaaatctagggttacatgctactatgttgggtctattttatgggcctgctactttttatttgggctgagaaggggttgggttgcaaggcatattaggccatatgtgggccaaacaggctgaacccaaaatggcctccattttgtgggcttctgggctatgcgtttgtccaagtctcttatacaaacctctcagaagaatggtgagctgagtgctgcttgaatttgtcaaagacgctatcatgaactacgttactactgcttgaaaataaacctaggagtgataattatgttacaattttgcacatgggaggatgcgagtaaaaggggcagaggatcctgtcatgacgacctacactaacccttaaaaaaaaagatgtgaaccttttctccttctctttacatattgtggagacatgtaacttttcctatcaccatgggagaaaaaaaggagggaacactttgttgctcatcctccccctatcatgcaagaaatcatgatatggcactatcgtgcgagccatcacctcgccacaaatcaaacgctcgcattttctttctccccctttttttttcatccattcggcgtctcggtcactccctagtccttctcccccatcattacaaagctcgctagtcgctagctaccggtcttagagcagtcccaacccataacattagacatggtttttataaacttcacatcatcaagtactagacactactcttccaatgtaaacaccactattacatacttcaatttaatgctacttatctcacatgatgtcttggatgtcgtgtagaaaccatgtctcatgcaagatatggtttccttctctttcttcatttattcacttgccacattattttttgttttaggtggcaacttattaaatgctatagataacatcctagtcattgggttgggaatgccccttagcgcgctagcagcaaccaccagccgtgcgttcatgcacgcacatgcttgctagaaacatagaatctccggccccgtgaaaatgttacttttattgcgttgtttggcatatgcagaacatgacgattatttgacgaagatacggagtagcaataaacaaaccagcaccagcagcgagtttggacaaggagagtaaaaactgatgctgatgcgttgcgtcttgcgtgagacgcaacgagatcgtcgaccccgaaacctagcgccggtgcgcggcgattcgccgaccgcgcgcggcgcgctcgtgcgcgtgcgcgttgcgcgatgcgttctctctccgcgtggacaggagaaaaggtgggtagagcgcacggcacggcacgggcggctgtgattttgacggctctctcgtgagccaccatttacgctgggaacccgccacacgcaccgcccaggtctcgtgcgcatgacgaccatcaatgccggatccgatccggtccgtccgtccatgcccatatccgtcgcgcaggcgcagtttgcataaatagtcgccgttaaccatgtcacgaggggacccaacgacccctccccacacgccctaaccccccacgcttctacgcgtgcaaccgggtcacgctttgtgcactcgtgatcgcattcctcgcacaattcaccggtggcgtactgccagtgtacagctgctactgaccggtataaccgcattacctgctttcccggaaaagatgccactgatgttggagtaactatcgcctactagcacacacacgagtgcctgatgctgtgatgcaatgcctgcctgccgtgcctgatgcaatgcccttgattgccttcctcataggcgtatactaggcagtggtaccttcttcttactaatggggctatctgatggagtgatgggatcatgctagtgtggaattatcgatatggtagtagagaataattacacaaccgacagattaagctgtgtaaaactgaatgaatgaatgaatgaatagagggtggctttcgatcagggcaactgcagtactgcacgatcggcagcagaaagcaaagcaacagagcaggcaggcaagtactccatggaaaggatgccgttagtctgctgcacctgcatgcacggcctccatcgtgctgggctgtagcatgtggcaggtcttggtctccttcacttctctgactgactactgttttctcacttccatgatccagcatcacatcagtgaaaaagtcagcaacagtaatatacagtatatacacacacataccagtagaacagaaatgttttaagatgatctctaataatagaattaatctagaccacttatttttttcatacaaattatagtatttttatttgtgaagctgaacaaatggtcctagccagatcatctgcttgcacttgagccatccattcttgataaggtttgcttgtggaaaaaaaaatcacatggtatgatgatctgtataagtcgctagctagaggcattgacttgaatcagtacaagcagcttgcttggaagcaaacatagacaagcacagcaagggatcctaaaactcctccagtcaagcattggattcctctaggaaaaagaaaggagcatttttccaatggaaggatatgcagctaggaaaaaataggataggagaagaacaaacggtctagaataaataccagtatccgtccatgctctctgctttcatcagcccatgccgatctgctgtgtcaattaactgtgtatggcactgttccattactgtccttcatggaacaccctgcactgtacagaccccccatggcttctgcagctgccttcagtcactgacctgtggggaccacgcatggacactgatgggaattgaggaagtgccaaaacagaagatcctttgattgccagagcactgtaataagttttcctttgtgtttgctcagtctctgctgcaaactatactctctgtgttggggcctctgctgcttctctgattgctgggctgtaatttttggcatctagagatattactgccaaaaggacatgtctgtctagcagccaacttgtaacctgctgattaacttatggggtcctcagtttattattatttttcttcctcctataagttatattaatttgttggaacctctgtttgttcagcctccttcttgtagactgctaattactatcaactcttgtgtttttaatttatcaatcttcttacaactacaagtgccatactgccattaatgcgtagtagcttctgttgttcttataccttccatgtgcaggccctttgattgaagctacagtcatttttatggtagtggagcattacttgtgagatttctgaatggaaaattctttacatgcttatccggtctggtatgtttcttggatgcagtgtgtgatatcatcatcatctggacattgatagaattgtcaggctccatataggctaattaactagttgtatctactgttatttactctgtgcccagtgttgtgagtgtttaattagccctagtaggcaaataaagtatactcattatacaatcttgccatcattaggccaagtgcacttacctggaatctcccccattacaggcgcagttcatcagaaatgcatatttttctctgacgagaagagatcagcaaacagaggagacagtgtattaatactaatttaattttagtattttaccgtggatcgtaacttttgtctaaggcagtgagccgcatgtgacatcagaagatcgcacaaaacttcgattggtcagaatgaagccatgtgatgtgcttttcttttctatccatttcgtgtcacaggtaccagcacacactgatgcgatccgaactaaatatatgtgtgaaactaaagatggtcgatctgtatctgtcggctaacattattattatccaatgtcatgtctgtttgtatcatggaaagggcatagatcctttagactacaagaggaaacgacaatatgtcatcttactagaaaacaaatagaagtagagaatccaatggcatatataaacgacattaatctttccttctaccttggaggacatatagcaaaattgcagtttgtactgatagatggagtcaatggtattactcaaacttactccatatttaatttgtaaggtacaaaaaaatgaagtaattttgagaaaatgtttcggacgtggattgatattttttttgtaagaatacttcctgatatttgtttcaagaatacaagatatcgtgatagcacatatatagccatggtatctatctttctatccatctatccatctatatctctctgtctatctgtctgtcctgtctgtctatctatctttttttaagagagaagggtaagtacgttttattcggcctctatatccaaccggatatatacatccatctatctatctatctatctatctttctttcttctttctttctttctatctatctatctatctatctatctatctatctatctatctttttattagagaaaggtactttttactcggcctctacatccaaccggatatatacatctatctatctatctatcttttttttagagaatggtactttttactctgcctctacatccaacgaatatacatctatctatctatctatctatctatctatctcgtattatgaagaggatgtaaaaataagtctacctaaatatttattatattattaagatataaaacagataaaaacaccaaacttactctatagatcatgttgggtttagattataacgatatagactgattaaactacttttttttaaagaaatatgggacaacacgagcgcactctacatctatgagcacctctgaattggaagactggtcagaatatcttgagattgacgaagtcaccacaggtgccttgctatcaaccgatatgttgaagtcaccacgggtgctcgctatcgacggatatgtcgctgtcactgtaaaaataattagccataaatacgagcacccgtgtaagtctagagcttgaactcgggtctaggcggactgttttcaccactaagaaactaaccagttgagctacctcactttcctatattagttactttagttttaaaatattgtatctaaaatataactatacctactagaccatgaaaccttagagtcccactacggtgctctctactggtagtagaaaacaatatgaatcattgttattatttgattgaaggttcaaatctatttatattacctccccaaatagcggtagtagaaatatgcaggggtattattatcaaaaaaaaggtgcgaaggggtataatcatcatttaacaatgattaaactttttttcttctttttaaattttcctatggaatatgagtgatgccagtgcaatagatgaccattgatcaatctagccaagaaaaaaatttaacaaagttacccctaaccattgtattagtaaattattaattacccttaataacaaaaggttcatatcttttctacagctggtagtatcactacttgtagggagcaccgttcttttagataatggataattaacctgaatgtcgcataaaatatgaaaacatgaaaattgttgggttgaattttgttctgaaaaaaaaagaaacttgtaatacccccttcagttggtaatagatgatgttgggcgaactttgttgttaaggataattagtaatttactaatacaatggttagcggtaacttgtacaagaaaacaacccttaaacttgctaagctagttttcttgtggtggaacctgcacaataaattcaagttctagatttatcacatgtgctagtattcacgactaattattcttttaatagccaacgacgtgctggtcgacaataaggtgcctacggtgatttcgttaatctcaaaatataccgacttagttaatctcaaaatatactgacttcgttaatctcaaaatatacccacaaagactaacgaagacacatacgcgcacggtatctctatgagcacctacaaagactaagtcggtaccgtgcgcatatgtgtattcacaaaggttagcgtgcacgtgtgtacatgagaatttgtatttatattgtgtttagaaaaaataaaaagtaatattttacgttgggagtactaatgccaggaatgagctagtattgaatcgaattatactttttaaaatgtagatccgtgtaaaacggtatgaaaaaatcaaacccacaacatgctgattcatgcttagaaataaagttgcaacacattagaatccatgaaatcttatgtggtttcagaggaaggatagggaaaagaaatgatcctttatatacccttttccaggggcggagacaggagtagggcaactagggttgcagccctactcctgatcctaaatattcattgaaattctattttaaaactttaaaaactaaaagataaaggcaaaattatatatatttaaccaattgagtcttaggtttggaaaaattctagctccgcccgctgcccttttccttccctagactttatcatgtaagttccaatgcgttgccctcgcgaagaaaaagctgaacgtgtttgaacgtaccacgcacgatgggttacgttgttgaatgttgatcaccagtagattgagcgatctcataagcaaatatagaaggtcagcgccgcaggatctgaacattcagctaccgaagtactactagtagccaattagtaatcgatgtgatactgatacaatctcgttgttgatcgaggcgaataaacaaaccggcacgcacgcacgcacgacgcagaaattaaccaccaacgtgcccatttcggatcgacctgatagcagtcgacagccgctgacccaccaccgcgtacgaattcgtgacaagtagtggccccccacggacgatcacccccgattgatcgaatcccctcctgcaagtctctgcatacgccacatcaatgcctcctcatctcttctccaaaagaccccccccccccgacgtacgccagggcccgtatgcgccacacgtgcgtgtgctttcgtgcgcgctgccgacgccgcggccgctcgccacgatctcgctagccgctagcgccccatgcatccgcgcgcggcgatgctccgcgagaacggttgattcggcgagcaaacctgtgtgtgtctgtgactccgtgtgataatgcgagtgagagtgtgatcgagcacgaggacggtggcatgtactaccgccgtggacgtacgcggtggctggctctgtgtctccgtgggagatgggtctgtattgtacggttgggtaaaatgggtaggggccagccggcagtggccaaaaccgccgctacccgatcgaatcgatcacatttatgccttgccgccaacttgccgtttcacggtccgggcgcgtgatcatgctccttgtcactgtcccccctcggcatgcacgtttcgtacgtcgtcgatattcacctacttttggatcgggtgtttgggcgttttggcttcttttttaggctagactacacttgaaattccgctcctacagatcgtacaggctctctagcccgacaagggaattaagccgtgaaaacacgtcgatcgttttgcgcaaccgcaccgcaccgccgggacggcacggcaggtagaatctggagccgcgtccaccctccctgggctgggccccgacctgctgccgatgctggttgctgtgccagactgctcgcttttccagagaagccttttgagagttaaggccggttcctttcttgggttaatgccgcgataccgtaggagcacaaaccgtaattgcaagctactagtacgcgcgtaacgtgacgtctctcacgtaatctcgtcgcaacgtcccaaaaaaaaaaattacaagcacacgctgcacgcatccgttacggctcgcaggcgctcctcgcggccgtccgagaggttcaaatttcaaacagtcagccggagccctggagcaacggcacccgtccgatctgtccctgaacacgtgtcgggtatccaaggacggtgcggcgggggcaattccgtcattaccggctttccgtttccgttccgtttccgcgaccggcgattccccgttgcggctgttcgggaggtttgtgaaaacgaccggacgcgaccggcaccagcgtcgcagcccaacggccagatccggttaacggcgccgtgagtgcggcgggcgcgggggcatctcccagccgtcggatcgggatctgatccccctcgcccgtggcatctttatattgtagcaggcgacgcgacgcgagcggcggacggagagagagagaggaggaaaaaaagtgggggagagaatccaaagagggacatcacatacatatcccaccagcggcgaggagagggagaagggaaacggccaaagaaggcgacggcggcggcgcaggaggggcgcgcacgcggcgcagatgggcaagtacatgaggaagttcaggggggccacgggggaggagttggccgccatggaggtcacgcaggtggttggcgtccggacgaggtcgaggtcggcagcggcggcgggcgcgacgacgacgaaggtgaaggcggcgtcggcggcgtccaccaggaggaggaaggcgctgctgccgacggcggtcgtggggactactcgccgtgacggcgggagctgctacctccagctgaggagccgcatgctgttcatggccccgccgaggccggcgccggccgcgagggctccggttgtagcggaggcggcgggttccgggaacggagcggcggcgcatgcggcggctggcctctcgcgttgctccagcacggcgtcgtccgtggacgcggcggctcaggacaggagcctcgcgtgccgctccgacgtcgcggaggtgagggaatcgaaaccctagaattcgaattcgaaaaatgatcccagatctctaatcaccggttgctgaagcgtgcgtgctttttggtgatgttctacaggcaggcagcgagcatgtcccggagggctccgcgagcgactcggcgagcggccgtgaccgcgagaggtgggagaattctccctcatttccggcaaattcttctgaattatgcgttctgacatgcccctgacgccgaatcaccctcgatttttcaaaattttcaaattccaggagagaaacaactccatcaagctttctccccggagaggtgagcgatctggagtcggatctggctggaggacagaagcgcagccgtccactaccttctgcggcaacagcctcagcacagcaagccacgcggccgaagattccgccggccgccgagatcgaggcgttcttcgcggcggccgaggaggctgaggccaagcgcttcgccgccaagtaagtatatacagaatttttaccgctcgctgtaacatctagtaaaagttactgcgcgccctagctagcttcgttcttcttctccgatgctcgcgcgtggcgtgaatttgccgctgctgccggcgagcaagataattaacgtgcgtgcgcttcttcccatggccgcaggtacaacttcgacgtcgttcgcggcgtgcccctcgacgccggtcggttcgagtggactccggtggtcagcagccgaagctgaagcgagcgtgcagattaagcggaagctagaaaggaaggtacaggggggcgccgtgtagaaagggaaggcgagctagagagaggagaagaagaagaagaaaagatgctcatccaaagggaataaactggaaaagtgggagactacaaaaaaagaagcattatagcctaacaaccaccgattcgactcttttttctttcacattttctttgcatttttactcttactgtgtactagaaagtagtagcagtagtaaactagtaattcgtcccagtatttatcagaggtttatctcgataggaatagatatattatccccttactgtaattgcctccatcttgtatttggatggaaattaaatttactgtacagcagcagcagctgttctgcaagtttaagttaaccatcaccgttttattacttaatttcccatgcattttaattcctgcaatgctagtaccacagtgctataagctcaacaaaatgtacgtctttatcgtttaaatctcttggtacatcagatggaaaaaaaatcattgttccatttagtagttttgcacgtactacgttatcacacaggtcaaccaaacctgcaaaattctttcttttggctgtgtctctgagtagacgcagcataattcatctcgtctctgagctagagcagcatatagtacaggcaaactgcagtggaggcttctatggcgtgccgtgaaaagaaggttaagatgggtcctgcagttcccgtggccgaggcggatcgtccaccaatggtatttccggttagtaaaaagctccatcttgcagtaaagtgcgactaaactaagcaagtaaactagtatgattagtgcggggtaaacgagtgtttacgtgtagacgattggctttggatcctgtgcacatgggccgtgcatgtggtggatgagacgatagagagagagagagaggctagggaatgttacttccatcgggatctgggtttcttcagcttggttgataaaaactatgaggatgacgaggagaaacagagagaagttttgcggcttggatttggggccacagtgcgtgcccactgctgcttgctggctttgcactgaaaggaagaggggcttttagtgtgtggcccactgtttcttgtcacttgaccttccttgtccatttgggttatttctgacactggctctatatggaacttcactaccagtactaccattaccgtgttatattcagacaaacatatataacagatgatatgtttttcagttcttttttttcttctaggtgtgtgtaaactgtttaagcgaagtcaatttttttacttgcatttacaaaatggaacaaaggaaaatgggtgctcgtgggggtggtgtgcatgggagggagatgacggctagcacgagcacgttatgagcacgactatttatggcgagttaatatactaactggccagggttcacaaggtcacaacaccgaagcaacaagccgagatccatggatagtggggggtagatcttgtgaaatccggggtggttgtttgttcggagatccagccgcagatgcatctactaccatcacagcagcagcagcagcaagtggcgagatgaaaaagagagaagctcgcatagaaaaatggggttggagatcgatcgatcgatcgatcagagcagaggccaaagcatattaaaaaaaaacgaggtggtttgcttggggaagcgtggcgctgagctcctgggggaagaaggtgaggatcccgaagccggtaaacattccgcggtggataacaataaccgtcaagtggggtggcactgaaactgtggcttttgtagctccattttggggcaggttagctttggaagtggcagagtttattcctccgtttcaccctgcctaccacactagtagtagtactactgctgctgcttttatctttgcttggcttggcttggtttgcagtgtcacagtttcaggtccggtttagtttctaatttttttcataaaaaattacatcgaatctttaaatatatgtatgaaatattaaacatagattaaaaatactaattacacagttacgtgaaaatcgtgagacgaatcttttaagtctaattagtccatgattagccataaatactacagtaacacatatgtgctaatgacggattaattatgcttaaaagattcgtctcatggtttccagacgagttatgaaattagttttttaattcgcatccaaaaactccttccaacatcagatcaaatgtccgatataacactcaaaaattttcttttcgcgaaacagggcctcactcatcagcgagctatagctaccaggtgtactacgtaccaagaaggccaggacctgtacactgcagtagcagcacagctgctgcacaggagccacagcttcgcttgcctttctcaagaagagtgttcgttgagtccatttttccccttcccttcctgagagagaagccaccgctagatccaaaagtctgaaaaagcgcagctcggcatgaattcaaaaaggggtgtttgtagtgacagtaacctgcagggaatggcagagaggtcactgtaatctttcagagaatggcagagcttgctcctgctgctgcagtctgctgacaccgtactttaaccgccggaattgctctgccatttggtggtgcctgcacttcctttggtagtactagcagtacctgcttttgtagtaagtgtgttgtccatagtatggtgatagaatcagcatgtggagttaatcatctatggatctctatgtatgattagtagtagtagtagtgtgtgtgtgggcgattgcaacgggacaacggagtaaatcgaccaatgaatgcagcaaaaaaggggatacgagtgtactgctgctgctacactggctagtgtcaaggacgattttgtgcttgaacttgtcactggcaaccgtgttttgcagcagaggattaacggtacttgcgtgtacgtacagatcggcaacccctgttttgtttttcggccgttgctctgtgcattcatggtgtgacgacgagatgggcaccgtgtacgggtgtaaatggattggatctagacgccagaattagagtagcagtaaaatactagtatacgttgcgcagaataatatatccgtatccgtatgttgaaatttctttgggccctgccgacatttatgcaccttaaatacggatcgaatcctgttgatatggtacagtgcatacaaatcgtgtaacacagagagtagtgcgtatatctcaggagtcgatcgaacaccataagcttaatttggattgaacacatatatacgggttttaatttctggtcgccaaaagaaattactacagcccgtgtgtctcatctctcgactctcgagtacttttgagtttggcctgagaataaatttggcccatgataactagtacaatctggtcttctcggcccagtgcccaacgcgccggcgccgtgcacagcggctgccgtccgcagcgaccgaaaccccaggccgcctcggcacgcggctttccgtgggccgcggctcgggggcctcggcagaaacggacccgcgcggcgtgggcgggcggcgtcgcgcgcgtgtgtcacggcgttttttctcccatcgctccccgcgtccaacccggggaaaacgccccggcgttttggtcgcgtcgtcgtcacggctgctgccgcggctgacatgccgcgcgggcggcggattgacgggtgcgcgggggtgagggcaacctgcgcgacggaggcagggggagctccgcgcctgtgcgcgtgtcgcgtcctgccgcttcgtgcctcacagccgcagtggcgcagaacgccagaacggatgcgcgtcgcgcggggagggggccggttcatggagtgtgctgatcgggtgttggaattaatagaatgggctaaggcccattcgaagattaattctttgaaaaatcataaaagctcacctcatgagatgacatgcatgtggagtttagtaccaccttacttattctacgagatggggacctccttaaaggggaggatgccctcctagccatttgaagcatgtgtggtggagagaagagggggaacacgcgcgcgcttgctcgcctggcctggtaggcggcgcgcgtgcatgacgtacgcgtcgaatggtccacaaaattggctccgcagatgcaacctccttttgcagttttgttttgccgcaggaaaattcggatttgttttgttattggaaacattccgaaaaacccggtgcgtgaaaacggcatggagtccggataagttacgcgcgacttatctggctcggttacgcagagtggagatcatgcgggcgccctgatcaagcgacctatctctatataaaccgtgcagccgccttcacgcaacacacgcgaaatcaatctagggtttgcctcctcctctgtgttgcaccgtcgctcgtagactactccataccgctcgctagcgtgcaccggtgatcgggagagcaggtctccggaacctctgccttcgacgtcttgcacgagagaaggcggcaataaggtttttgggaagcgcttcgcgcgactgctccctgttcgtctgcgacggctcgccttcctctccgctcgcgtgctgcgcgcctttgtcgacgctcgcaaccgcgagtatttcctgccgagcaaccggtctttccgccacctcggtacgtgttcgatatgttgcgcatatttgatctgttcatgttttactgcttagtttacatgtgtagatctaatgatgcgttaatcctagtataaatatgtaatgccatgatttatttatggaatatattaaatcattatatgcctatattctcagcaatcgggatcgttcggcaatcggcacgatgtagccgtggttttctggctgtaaacacggccgacgaagtgggatcactgggatgtgattactcgcggcagagtcggtacgttaggtcgaaccagcgggttctcgcggtcgcatcagcgcaacgctggtgaggagcatggtgcattgcatcgttgataagaccggcccaggcgaagacaaaccgatgacccactggtctgtgtccacagggctatgcacaagcagcacaactcgggaggacgacgggttaatttatctttgtggatggagtacatgatttgattggcaataacaacatattcagatatatttgcccggagaagatagatatcagagtacgtatgcctccaacccgtccaaactattattttgatttttgttatatatggcggtgtgtgtaaattaaatattagccaacatgatgagagatgacatacactaaaggatagggtagggtccatcccgatcgatggcaaacatttggaaagtttcatcgatcctctctatggagttcccttgatataaaattacttattttgagatttcactttactctattttcacatttcatcctgagcataacaatataatttagattcttaactatttaccacttttacgagtgataattaagaatttaccactaaactcatatatcacacatatgagaaaccacatgtgagtgataaattcttaattgtcacatcttaaaagtaacaaaatagttaaatgcgcaggacacttgatgagccaaccattgactgaggtggaacatattgtaatagagaaactaacttacggagtgcattattgtccttactattgattctacttttttatgcatgatcgatctaaatagctttagtcattacatgcatcaatcatcgttatctgttataattgctctcatcattgttgttttgtgaggacaatgtagcaacatttggtgcgctgttgacgtaacatttccttcgtttgactagctgtggcaggctctattattcgttgtgctctgtacccttggcatcacgaggttaggttcactggaactgactttatcttgcactggataggcaaccatgcttttgccctaattaccagtggcgttttttccttttctgttccttttgtagaaacccttctttataatggaggaattctggacgatttttgtgggaatgtctgttaatcaattatattcatatgaaaatcctacaaaatttatacgttcaaatggagcccttaataatccaatttattgggttattaaatagtccaatcatccaatgcgtgtgagttgtgtggattactgttaagatatatggacggttgagatttgttaatttttttcgcgaacgcgttagatttgttcttgagaatggtagcaacaaaacctggcctcttgacaagaaagaaaaaagaagctattatgccaagatctggggggtcctgcacaaacgtcactgattgcgatcagttctttctgtacttgtagctctccaattggagcgattggatagtggatttagttagcggagaacgtacatgacttggaaaggagtttcacagctttgttatcaaacatgttcagaagtacacaggtttttttttcttcagaggagttgtgcatgtttttgttgctttatcctgatgctttgaaacaatgctcagcattcactaaaggatacggattgaattttgcatcgttttcttcctagcctcaaacaactctgctctgtgtttcagcagtttcaatagaacttgtggagcttgtgagtactatatagtacatccactattgctagacgccttaccgagatgacgacctgtattagggacaaagtgaccacaaaatccgctaactaaagtgactcaacaatagttaacagtcctattggcttgtaaagatggaaaagttgagcaccattgcttgcatcaatgccctactttcagtttaatttaaaaccaagatgatttgatgtatgttgagaaccttgaaaacgctttgcatagagccgtgcatctagtgcagcactgcagcggacatgtcgggagagtgaagtatcgatttgctagaaacaaaaaggatcatgattcaggtggatccttcctctgttcttcctctcgttctctatcatacacactctcttctgtggatcttgtccctctttatgaaatcatacagcagagcagggaacaagacaaaggagagcactgttgatccccacaggccagaaaggctccatcactataggctatcctctcttcacagatctggccatctggcagactaatgattgcaccataaaattttcgatctacacaagcgctgcattttgtacagggtggagggggaaaaaagaaacaaaaaaaaaaagaagaaagaggaagcaaagactgatatggatctagtggacagctagctagagagacagcacttatgcaagaaaaaaaaaacacaattgtttgctcttcagcacacactggccatctagcacacaagcaaccgagcacaatcatctacaaaaactagcctttgagacaagtacaatgcaagaggatggtcacaatatgagacagagacgagagttccatgtgtgttttggctgagtcccatatatgtcatctcattgctcctgcagtgcatcaaaggatccttaatgagacaacctatcatacatccgtgtactaatgaactgcgtaccatgtgtgtggcatggtggactgccaatcatggctcactgacctgcttggaatcggccacgtcggtgaccatctcggtgtcgacggtggtgctcttcttggcggtgccattgacgccgccgacgcagagaggcttccgcaggccgagcatctccttccaccggctggatcccttggccgacgccctgtcgtcgcagcgaagctcgtcgcggagcgtggtgggaggccggccggaggagaagccgccgtccttgaggggaaggatcctgcccttggagaagagctggtcggcggccatcatggggtggctacccaccgagaactcgaagttgatatcctcctcctggcaccgcaggttcatcgcccggttctgcaccggcggcggtggctcgacgacaaagtcgctggagaaggagatgcgcgggcccagcgccggcggctggccgcccccgaacgccgcgccgccgtccgggttgtacatgttgatgcatgccattttgacgctctggtggtggtcgtggcctctcctcgcgcgcttctgctccctctcgtgctctcccttctccactgtgagctcaattcgcttcgagttgcgaggatggaggtgatgaggcgtttaaaaggtggttgtgtgagcaggaaacgggctcgttgttgaattgaatcagaaacaggtcactgttacggctcaagggtggagtggcgcttgaggagggagacgcctatataaaggagggagatgcgtgacgtggagctcgggtagatgagcgctgcagttgtttagcaccgcccgtggtaaaatgctgatgattgagttcacaggatgttgactgtcccttttctgtttctttttgccaagtcaccatggatcagcgttaagcagcatggccagtgtgtcactgtgactggaatagaaaatgtcaggatgaccataatcttttaacattgtaccgctgaatgccaaattgccagtgagcaaaactgtaataccgactgaatgaacggtgtaactagaatacaaaatgtcaagtcatatgtggatttatattttcagcagactcgtcgttcgtcgattgtaaaatctgcaaacatgtgtttcttggaatttactgttattttgttgctatatacactttagagatgataattgctttcatgggcgacaaaagaatattaattatttttcttggggggacgacaaaaggagatgggatcgttccgaaaccagctctgattattttatggtggctttgggataagaaggctggatttgttgatttgcgatcttgagagtatggatcgcgagtctcaatgcggatcggatgcatggacgtacgtgtggcgctcatgggggaaagaatcaagggcgtcggtgagagaaacaatatttttcttattaaatagtgagacgattgcttaaataggtggcaaatgctgggttttggtttgactacggtcaaaaaatggttgtccagttcatgcattgcttcgcagcagcattgcgaaggaccagtttaaattactcaaataacgcaacttggtagttggatagactgaattttgctaaccctcagttacacctcacacgtgattctacaactctttacctcaatgaaagcaaaagcatgtgcgctgcagaacacaaatgcaaggtctggctggcctggtagccagccataccttacaccgaccaaaaccagaggtttacttttgagcatgagagctgaactccaaattatttccatcttaagtatgcaactagaatgttctgaaataaaaacagagaacccacggctctaagaaatgcagggcttgcttggtttagtaccctaccaatatattggtagtgccaaactctaggcaagttttggcactaccaatattttagtaaggtagaattgtaaatgattgcatttgtatttatgccaattgagagccaaattttaaattgtggtgaagaatattctaaaatcgtgccaaattgagtattggcattaccaaacatttggcttcaaatcaaatcatcacatttgctatttaaaccacaaaaaaattggtatggcaatattttggtatcaaatcaaaacgcccggcaatgtgattcctagagagggacccggtttcgtcctgtttcagactttaaacccaaaactaactgattcactttgcttttttcaaagttaacttcgtcaaggtacgtttagaagacacatgaagcaaataaatgcatttttctctaaaagttggcccagcgcaggtgaaacaagaggttaaaacctggttggaaagctgaaccctcccaaccgatggtactaattagtacggttgataacatgaacgagcgtacatcaaaatcgaccctagcggcgtgtctagattttgtttgcaagtataaacatcggtgtttatcacgcaacgcctaataattgagtccaagggcataaagacagtggggtttctgaggagtatggaacaagaagctaaccttttgtgcgttcccaaatatccatccatgattgcgtggagattagcagggttccaattcgtccaagacatcagtccttttcttcattgaacaaatgatgatccaccacaccacacaaaatcataccgggcaacagtccgaaggcatgcgggacaagggaattgaaggcatttgttcatgaaccgaataccaatgaacaagaaaaccgtacagtctggccgccttgcagggtgtaggccggtggtagctttcttgccctggattagggaccagcagtgcctgcaaagactagatgttgaggacctgaagaacacagtagatgatcccagaaagcgaccttccttacaaattgataagtatgctgtacaaggagaaagcgactccatggtaagatcactatagtgtagggtaacctctgctgaaagcatagaagtatgaaatgcaagcaaagaatcggaaaagttcacagaaatgccagaaagaatgattatttagagtaattatgtagtttggttaaaaaaaaaggaaatatatggggaaaaggttggcttatgccagtgatggaaatccagctcaaatgatggaatgctagaaactgaaattaaatggcgagtagagcaccaatgtaaaaatatccaaaatttatgctgtcagcattcaggtagaaacatgaattcggagttctttctaaccttgaagtaaaaagaagaagttaagagctctgttcaactgtacactgacacgcagttaccattagaaacactggatagcttaacaatgtccagaagtggaatcagatgggcaccaacaggtgaagaaggtaggtaccaaaatcatttgactgatactagacgggtttgttagtagtgtgagctggcgacatcgacctctcggaataggaccatgtgatccccaagaatcctcttcattttggttccatctccatgaccaaatgataacaagagtccttggtcctgtgcctccaacaagtcacaacggaccagtcaaagagttcttgttccacagtaatgcttgtcctatttgtaatagatcataactatttagcaattagcagtagggccatttttaaatgataacatgcttcatgatgcctcgcatagtaacacatgctagtaggtggactgtagtatgcttcagtggtaaactaatatgtagaaaaagaaagcaagcaataccacgcatcccaaatcataccaacattaaaattagaaatgtataacagtgtcaattatgcatgagaacaagttatatgtcaaaggtggagttgaaactgacaataattacacgtccaactatgcaacaaagacctaggtttaaggttcagttatgccttttcttgaatacacagaacaagtttcagttatgcatcatgtcaatggaaaaaacaactgggattgttagaaaagattaatacattgtatttttttcattttcaaattacaagtttataaataataatttgttaaacctacttacatgtaatgcacccagcctcaggtggagctttagttctctgagatatcaaactatgccccttttagcgctcaatgtgtaacaagatcctaacatgttgggagagacaaatgtattgaatagaatttgcacactggcgcccaaagattatggaactgtgaagattatgtgcccaatcttaaatcgcattagcaacaattaacagaagttgcgggccattttggaagaatggccataagattaaaccatgattcatggggagaaaagactaggttagaggctgccgttacaatttaacttgcacaaatatggtcaaagactcaaagtatagtacaagcaaagcttttgagatctagagtacccatgtgagcacatgaacagcaccgattcatttcttccagcaatgaattaacttttgtgactgcacatgtgagggatggaaatgattaatgaagaacagccccattgtgacttaacttactaccttaaatcctacagatctcaggggggagggggctaccatgagattttgttttttcccctgatgctacaaatctcataaacgtagtaattttgttacctatcagcaacagggccaaattctaaatagcaaaacatgagaaacacaactgaaaatagcaaagatatccaaattataagacattgtacttgtattttgatgggaattaagaaactctagccctgcataaggccataagcatgaaaggattattctaagatacaaaatggccgctaggctggatctaggagtacttgatttgactatactaaaaaggagagtggaacagtgcaaacgtcaagcttttattacaccatcttaaaagtgtgcctgtcacccacatggaaaggcctaaacaaatgacagctggagatgaaagcataccatccaagtggttggtctagttgcttgtcggaatatcaagcttaaatcttcctgttggtctcctatccttacggcagatctcactttttctgaacctttatttggctaatggctacaccctgacaacttcaagcatggggttacaattcccaaggccgtgagggagaagcatgtagtacaatcatagaaccaaacacattccaaaactacaggtagaacgtgagctaacaatgatctgagacatggagagttgtggaaagtgctttttagactaagaccacacattctcaaaacaacctaaaatttctaacactgcactagaatgccgaacttacattatatttcaagaatgcaagctcacaaatgccatgagttttgcttttttttggtgggggggcggggaaacaaatggcatgagttatatagaaagaacgcagaacccacatgatattgatgtataagaagtggaaatagaaagaacggaacatttggcagtaatatgaacaaaggtttagagcagtacagttctatccggtgctccttttctcttgaaacaatctgcaggtaacaacaatcatgttaattttctgaaccatctgatggaaagctcaagtaatggaaattttgcatactgatcttcatgttccactaataaaaattgttactgcaaatcaatgtaagataatgaggggattcctttagattacttgttatgcaaatcccaaattgtctgcggccagtgcttcagattgcttgttaatctaccaaattttatgcgttatttcacagtgaagaaagcttcagatggcctgttaactcacttgtatgcaatattcgcagtttcacaccgaacagaccattcagggacatgcagcattcacatgatataaacaaaatcagcagatgatgttatctgttcagacttgagttccaccacattcatacaaaatcatcatcagacgcatcagaaataacatgaagctttttagtttgttgatgatctgaagatgtgctggttttgttcatcccttgcaaacagtttggcagcattcttctggacttagttgggaatttcatagacgaattctttaaattgaatcccatcatcttcagattttttccaagtagagattgccgttcggttccaggtacattagaagaattgatttttcccacttctttttctgcattaacagtcacttcatgtgttcgatgagttgcagctcgcgccatagattcaactggaacaagtttcccatcgatctgatttgtgaaaacaaaagaaacctgcaaaagtgcatgccatttgttaacagttgccagaatttcttgaaaatcaaactctatatttcaaaaaaaaaatccttgatatcagataaaggttatttaactgctaaaaggacagcttcgcaggcaagcattttcttctttagaaatttagatatgtgccagttcatattgaatgctgttaatacatgacagtcaagttttttcctcaagaaatggcactagatagtgaccactctttgaaaaattaaattatggataattcaagaacataacgccccttcctccttactcatccatatggagtcttccctcatccattactaccaatctgctaggttcaaattactctattttcaagctaaacctagtcctgcaagcttgagataggacatttggcaaattcaaatatgtaatttttcatccttatcttggcctattatgaactgctaagtttggaacgactgtggtggaccagctaatacacacagcgtgcacagacatgtcagagctgtcacttcataggcaaggagtgttactttgagatctatcatatgatacaatggtggatggtgaatagtggatgggctgccattctgccaagaggcactttggagcagcatatataaatcccaccacccccccccccccccccccgcccccaaccctctttcttttctgttttatcatgtaaatataatgaagatagtaaaaaactaaaaatgaacaagtggaagagggagaaacttattatgggggacaagtatgaaattgaacttttctatagataagatgtaagatgcaaatgcattgaggacatcacctcatcaccagaagaacactggagtatagtatcaggtacagttgatggatcagaatgatggccccaacttcctaaatcttcttcagaaggacttccaatctgaaaaggatgtaaccctgagttttgaagcagctagccaactacagtattaattagatgagtaaatttcacaaaactacatgttttatggttcaagttgcagaaaaccacacacattttgacacttggcaattaagtacatatattttagtagtttagtttcacaaaaccacactattgatgaatggattcacccatgagatgatgtggttgttccatctaggatggggacgtggcatcctattaatttcgtgtgatggctagtaataggatgccatgtcctcgtcctaggtgaaacatccacgtcatctcgcgagtgaatcaattcatcgatagtgtggttttgtgaaactacacaaccaaaatatatgtacttaagtgccaagtgtcaaaatgtatgtggttttctgcaacttggaccacaaaacgtgtagttttgtgaaatttactctaattagattaaaagttttgaagcagctagccaactacagtattaattagattaaaaataaaaagggtgtcacggactacctgttgattcgaactattcattttctgcacacatccagagatcgctccaaatccaccaatatcaatgtaactgttctctcctgagttagaagcctcatgctcagtggctgctgaatcaaatttgctaccatcgagaaccatacatccatccttgttacagcgattgcacttcaaattttcatgtatttcagacctgcgtcaccaaatgaaagtaagaaatccccacaaaaaaaagtaagaaacaatatgacacagaatatcagctatggtactgcatttatattaaggtaatgaaacaattgatacttgcagcttcaaaattgaacattttaggcaggcttttttatagttgctgccatattatctacagaaaaaaaaatgccccctctgtaaagggaagaaatggtcgtgagataatgaatgaaattgacaatgcccaactttttacatactaatattgcagcattcttgatcttaaaaacaattgtctgtgaaagtgatgctaatagtagtacatacgtataactgtctaagactggcagctgacaccacaatattctccaaataaatgaaaaattgagttgataaaaaatgtgcattggttgatggttactcagaaaagagaacaattctaatttctttttcccaaccagttcactcaattatccaccaggtatatccaattttatcatgtgttatatggttccgttggtttatgggatgctttcattaatgccttcatactagcaataagttctcaaaatatgaacataaataaagcccggaaacaagaaattaaagagtcccacaattcaaatgaacataattcacctgatttgttcatggaaggtaaaaagatcacgcagatcttctgttgaaagagaactcccctgttaaagaagatttgaatacagtagacttaacactaaaaagaattaaagaaagcaaataatcagtccaaacagataaacctgcattttgccatctgcttgttcctgctgaataactttttggagaccttctttcgacatctgacgctgatatacctatatacgaatgtcagcacaagaaagtagctagaaactcagcattcttccattggacaattaaaaaaaaagcgaacaatatctggaagtataagattcactggcaaccttctcctcaatggttcctgtgcttaagaacctgtatatgtacactctctttttttgtccatctctccatactctagcagcagcctttgtaaaatggcgatagatgaaaacaggtcagaccagacaaggtttggagttacaagaaccttcacaaggtgatgaagcagagatgcagagacattgacctgcttatcattggcagggttccaatcgggatcaaagagaatcaatcgatttccaccaaccaaattaagcccacagccacctgccttgctactaagtagaaagacaaactcatcctgccaaaaagacatatatagttgtatgttcaaatttggaacagttcttcaggacacagggcagattcttgatctaaaaaggggtatgtagcagattttacatactctggatggatcattgaattggttcaccaacttttgccttttattaatggatgttgctccatcaagcctaatatacgggtatctcctttcccgacataattgtgcaaacagatccaatgtctgaatttttagaagaaaacaatgatcaattattgttttgttcctaactgtataggtatcaaaagaggaaaataatttacaataactactctattctcatgtatcaagaaaatacattctatgcagtttaaaagcgcagtacatgctcaactactgatttgagataattatggagaatgagccatacatagcagaggtaggcactaagatgtggagaaaataaggtcatgggtaaaatcaagcgcttcgaaatatattattttgacagctatagaaggaagccaggcatatatattaaaatgatgtaccacaaaacctgacctgggtataatttgatacaagaacaatacgatcatcagttttcagacggaggtgccccagtaatctagctaagacatgcattttgccagacagttctacccacattcctcctccaccggtccatgatccagatcttgcacaaaattagaagttgctataagttgggcgagctaattttgaagctagttagaaagtgtgaaataccttcccgaaaacagttcaggaggaaaaaagcgcaggcagtcgtcaaaaccagagccccctgaattattactttttatggtgtcatagatcagctgcgatacaaatatagtcaaacaacaaacatcatgtatcgtgcttattacaacccaaaagttgaaactataacatgcaggatggctagtagcaacagtgtcacaagaaacagtttcccagagattctttgtaaccattatgtcatctaacttcctttatgcaagataatcaagaaaggaaaatagtgagacttcagacttggcccgtgctaattttgcatattacaaggattatatattcaagttacaacactgtcaatctgagcaggacacatgacagaattatcatgacaaaaataataataattttgtttcacattgaaaaaaataccaatgaggagccttttcttcaaaatctattacttccagtttttcatgcaggataccacatggtaacaataaggagtttgcaatgctgtcagagttttattttgtatggaagtgactaagagagatgatagtagaagtaataagattgttaatgaactttgtaggaatatcactgaagttactatcgacgaaacagcgagaaatgcatttctagtgacgcattaaaattatttacctttggatggttgcatagcttcttaagagcagtaatataagccaaaactttggattgctttgttccttcagatatcaagcgtttaacctgaaaagggcaaataatacagtgttgtaggtatagtgcctactaaacaaaatgtttggacttggaactatgtgatgttaggcactcacattttttgaatgtatgaagtggttgtacagcgcagtttgcaaagcagtcaacttgcagcacactacttcaacgatctgtgtataagcattaagcaatgctaaggcagaaaaatcatttgaacttccaaaaggaaccttataaaataagaggaatacagttttcaaaataaggcctacaagaccgcatagaaggaacatgcgccccaaccttgtacgactatgctgtataagcactagaagatgagttgaccacattttagaacctcagatagataaatgttctatagttctttcaatcaaaggtgcaacgaacaatatagggcaaaacttaactaaacagaaaattcaaagagttcaactaaatatatgagcatacctttggtggcaagtgattggataacagggcattcgtccgtctcaatataaactggatatcatcaagaaagcatcaaaacatgattaatgtctggttatattaaaacagaaggaaatacgtcaaaacaacttaaaaggcgcaagacatcataacccatgaatcataaacatgataaaaataatcatgttggtgaacaggcttcatcagaaggacaagtcttaccagatttacttttgcactgagctctgcagatctctcagatcccaagttcttttcttctgcacttgctgtgggctctcttccgcaaatgattggtgccttcagtcaggggcaggtaatatgagagataaatcaaagaaatattgggtgcacatctcacatgaacataggcacacagataaacaaaaaggaaatccttggactaatgaactctaatattttcctcccaatatactaactcatatttttgcagtatatcttgattcgtattaacttcaatacttacttcataatatctgcggaaatatgtagcatcccccagaactcctgggtttgtgaaatttaccattgaaaagaactcctccagatcattctgcaggaaaaaaattgtatcgattgacattgaaaacatttgttccattcaagaaagaaagacagaacaaaacaggaaagctaaaattacctgcattggggtgcctgataacaggatacgccgtttacaaggaagggcagccaaggcctacaacattatttgttgtgatgagaacatcaaggaggaatatatgtggtgcaaacaattcacgtgtataaaatattgagatgtaacaaatttacagttgatatactttattggttagggtctgatcatttttcagcctgtgggcctcgtcacatatgaggaggtcacagcttcccggcctttcaaattttgaagaatgcatgcggaatgtctcataagatacgatgagtacctgaagggaatgcataataaagatatattttcagaagacattaccatcaacttgtgtttgtttctgaactaaaatagcatagatgaaaatgaatgagaaaaggaacacctgaagacggctcaaaggttttaagaaactttcaattccagaaagaacatcagcgcgtgtgctttcacaaagagcaagcaactgcactctgccttttaaccatttaattatctcagattcccagttgctaactaaacttgtgggggttacgacgacagcccttttaaccattggcttagcatcaaatccttggcaaagaagggtgtatagtaaagttatcgactgtaaagtcttccccaatctggacaagtataaaacaagttaagcattatataataatgaaaaagaaaagacaagatggagggacccagcgtagtaccccatgtcatcagctaaaatgcaaccagatattccatcatcatttaacaacccagatacacaatcaaacataaactgaactccttccctgcatcagaacatcatcatgtaaattgtaaagagatgggtactgaactaaagtttaattatatcaccactttaataggtgttttttatgaagtgcctccaaataaacatatatggaagaggataatgcaaaaggagtatattacctttgatggggtcggaggtaacgtacaagcaagtgatcaaccttgattgcagaaaaattgctgttttccttgtcacgcccctcgggttgccacaaaatcaatggctctatgcctggtggaagggattcctcattttctacggaatcatcactagaaacagcaggtgattgtggaagaatatttgtaactgcaaatggctgcaccgaaccccatgggacaaatcttttacgagctgaaaggcgccgagcaagttgctcattattttcactgtatccattttgacagggaggtttgaatggctttcgagctattgctgccgcatcagaaaccgaaagaatacgtggaataagtggctgccttcttacaactagatttcccctgacataaaccggaaagaaagataatatgaaacaagacgaactgtttgtcactcaggctgtagtggatcgagtcgaaacaatctatctatctatctatctatctcttctcctatattataaagatagctcgaaaagaagccatcacccaccacattcgctgtgaaggtctagagattgctacattaattggagaaaaaaataaaacctaagccattagatcatggtgggaccaaattatagcagtgtagattgataggaacagttgtatacaaattacaattgtatctatagaaacagaatgtaagagttttatattaaacccaattctacttttaatatctatataattgcacaggaaatcccccagttttgtttatgtgaagaaagttaaaggcatttgacaaatttgaagtttacagtatacaggtaaaaaaggttgaagtgaatactagcatcatatcgcatggagcaaggttgttccggacttccagtgtccaaaagtcaactggccaaatacagtgatattggtggactccaatagatcacatgaacaatgtgtactagtcactgtcatgcctatatccataatatacttttagaggtaatttataatgttgaattaaatgaatcctgttattcatgatttagtaaataatgcatgtttatctagccaaacggcctatgttacgctatcgacgttcagggtttcagggatttcactttgaacttcttcagcaaataaacccatcacaactcttagggtcgatccagggatacaaatgtgttctcccagtcagtggagtatagattccaactctaccattgcccagacaataaaaatgttattcgccaactacggtttataactattaccctaaatttatgaggaaatgaaccaaatgttaccagactagggtacctaaatcaaacaacatggggaagaaatgtaaacccaagctgggctgttggccttctgggaaaatgtccaatgtggaattgcatcaggaaccccaagacagagttccataacagtcgtaagcaactaagcgtacatcgaacaatctcgccaccatcaaaatctagatccgcacacatgcgagccctaggaatctattatggtgcgtcgacacgccacgatctcacgcacgtacacctcgaagaagaaatcaactaatctattagccgaaatgggctcttcccagcatacctgacgagggcatccacattctgcgatttcctctcccggtcgttcgctctcacgccgcgacacgcgctccgaactcgccgcccgccgccctcgccctcgccatcgccaatgtcgctcctacctccttcctcgtcgccgtcgccgtcgccgctgccactgccgctgccgccggccgagtcactactctcccccacgtagtcgtcatcctcctcctccgctccactccccacctccgactctgactccgattcgtcggcgtcggaggagacggcaacgatctcctcctcctcctcctcatcggcgacgcggctgatgcggttgcatttgctcgtcgaaggcatcgcctcacctccctcgagtgaatctgtggagattggcaccgaatcgtgtgggatttttcgcgtgcggattggggaattttggaagcggggcggcgggtttggagagcaggagatgcgctccaaaaaatttggcggtacgaggggggaagcgtgcaggggaagatgcgggaaggaaagagtgggtggactggtggagtcagctaagctagtgggctaaactagaaggccctatataggcgatgtgatgtgagccgggtgtttgggcctaggaataagttcactttgactcccttaactagtgaccgaatctgattcgtatcctcgaaccgcaataccggatatctcaaccccctaactattaaaaccggtgcaatttgactccatcgatggttttgtagagcggttttgctaatatggcgcctgtgtggcagtgttgacctagcctttgtctcatgtggcacttatgtggtattagaattaaaaaatatatcacacaaaatatagtatgtgacccactgacatgtgggtcccacctgctgtcggtgacatgggaccgggagtatcataacttagagacttgagtcagacacgatcacccacgtggcctaaccccctcgggggggggggggggtcgggcccgagggtgatacggccgcccttctctttgtctccccgaggggttggaccgctcccgtctcggccccgagggccgaggcgccccgaccccttgtgggttttgcgccgcgtatatggggtaggtgagcatagcggggctcacctaaccacatttattgcggtttggacgagcgcgtcatgccgcatgtaacgcagtgcagcgcgctcgtttatccggtcagtgaccagtcacagaccgatcagatcgtgggttaggtggcgacaggcggtctgacgcacgcctcgccccatcctgtcaggacgagagcctccaagcactcgtccctagccggagccggcgtgttagctcctggagatggcacgttggttccggtcagatatatgccaggcttcatcctaaccattacaggcaagatattgtatgaagaagggcgaacatgcagatttatagactgacgcgtggtggacaagaatgaccgatttgtgaccggtctgacactggtcatgtcgtcagcagacagccattttcccacgtcgcgcctgcttccggcggaagtggaggtaggtatgggctgtcccatcagaaggtcattcggacggcaaccatacaagtctccgtctgtttatgaaaagataggataagtccccacaaaaaagagagagatggtgcatgtggtatccccttgaggtataaaaggaggaccttgcccacttagaagatgaggattttcggatccagaaagatcagagagggagaaagtaagagctctctggttctccagctcttttgtagcttcttcatacacagatccaccaaaacacaggagtagggtattacgcttctcagcggcccgaacctgtatacatcgcccgtgtcttgtgtgtttccactctcgcgaaccttccacactcagaccaggagcttagaatctcacccagggcccccggccgaaccggcaaaggggggcctgtgcggtctcccggtgaggagccccacgctccgtcatctggcgcgccaggtagggggctttgcgtgtgtttttctaagctctcgcattctttcgtgtgcgccaagcttttcctgttcagcccaatggccgaacaagcaaaggcgcacaacctctctccgagtgttagcggtgacgacggggagccgaacccacgccgtcgagctcgtactccaccgccccctccacgccaaagtcctaggcgggaggaggcgctcgagagggtcgaaggatccgcgacttcgacatccacgggtgatggggaagggcggcgagatggggagcgtcgcctcctcgtctacggcgacggcagcacgccccagggcgcgctccaagctgcgggcgcgctcctacgtcacccgcccattgtccctgacccggagtctccagcccaacgttggctggacgacgtggccaacttggtcatgacggcacggcagcgcctaggtgctggtgggcggtcctccgccaccaagacctctggcgctgctaccaccggctccgtgttgtcaaggcggagagcgcggcgagcggcggctgttgctcgccattcagccgccactccttcgtcagcgcctccgacccaggaagatctgcgtggggggccggatccccgcatcagtatcgagcgccggcgtaatggccggcgtgctgcccacgcaacggagggcgcctcctcgtccggagtgtcatatcaacacggacgcggggatcagccctccgtgcccccggttggtggtgtcggctgtagagcctttgtggcgagccttcggaacgtccgttggcccccaaggttccggcccaccatcgccgaaaaatatgacgggagcgtcaaccccgccgagtttctccaggtctacacgaccgggatcgaggccgccgggggtgacgacagggtcatggcaaatttctttcccatggccctgaagggacaggcacggggttggctaatgaatttgccacccgcgtccgtccactcttgggaggatttgtgccaacagttcaccatgaactttcaaggcacatatccgcgcccaggtgaagaagcggacttacatgcagtccagcgaagggatgatgagtcacttcgctcatacattcagcggttctgtcaagtccgcaacaccataccatgcatccctgcacacgcggtgatctacgcgttcagggggggtgtgcggcacaaccgcatgctcgaaaagatcgcctccaaagagccccagactaccgcggagctttttcagctcgcagaccgagtggctcgaaaggaagaggcatggacctggaacccctccggttccggtgtggcagcttcggccgcccccgaatccgctgctcggacagggcggcgtgacaggaggaggaagaagaggtcagcccattccgacgacgagggtcatgtcctcgccgtcgagggcgcttcgcgggccacccgaaaggggaggcctgcgagcgacaaaaagaaggaggctggcgctcccagtagggagcgctcaaccggcaagtggtgcatcgtccagaacacctcccttcacgacctcgcggactgccgcgcagtcaaaagtttggctgagcggacgaggaagtgggaggaggagaggaggcaggagcgccgagagggcaagtccccggcggttccttccggcaatcggcgaagtgaggccaagcagaaggcccccgccgaggacatcgatgacggcgatgatgacctaggtttccaagagcctggggccaccattgccactgtcgatgggggagcgtgtgctcacgtttctcgccggagcctcaaggccatgaagcgagagcttctggccgcggcccctactcatgaggcgacgcgccgggcgcggtggtcggaggttgctctcacctacgaccagaccgaccacccaccgtgcgttgcccggggaggacagatcgcaatggtggtttcccccacggtttgcaacgtgaagctggggcgtgtcctcattgatgggggagcagccctcaacatcctttcccccgcagcctttgacgctatcaaggccccggggatggtgctccggccgtcccagccgattatcggtgtgacgccgggtcacacttggccgctaggtcatatcgacctcccggtcaccttcggtggatccgccaacttccgcacggagcgggtgaactttgatgtggcggacctcagtctgccctacaacgcggtcctagggaggcccgcgttggtgaagttcatggcggcagtccactacgcctacctccagatgaagatgccgggccccggtggccccatctctgtccatggcgacctcaaagtcgcgcttgcttgtatggagcagcgcgcggaccacctcaccgccgcgtccaagcccgagggaggcgacgagaggcttggcacctccgcccccgccgccccgaggcagcggatagtcacatgcgacgaggtcccggtcaaggaggttgccctgggcgacggcccgtccaagaccacacggatcggtggtcttctggacggcaaataggaagacgcgctcgtctctttcctgcgggcaaacgctgacgtcttcgcatggagaccagcggatatgcccggggtcccaagggaggtgattgagcaccgtctcgccgtgcggtcgggcgcaaggccggtccggcagaaagtacggcggcaggtcccggaacgtcaagccttcatccgcgaggaggtggcgcgacttctggaagccggattcatccgcgaggtcatccatccggagtggctggcgaacccggtggtcgttcccaaggcgaacggcaagcttcggatgtgcatcgactacaccgaccttaacaaggcatgtcctaaggacccttaccccctgcctcgcatagatcagattgtcgactccacagcggggtgcgaccttttgtgttttctagatgcatactctggttaccatcagattcgcatggctagggaggatgaggaaaaaactgcattcattacccccataggaacttattgttatacgacaatgcccttcgggttaaagaatgcaggtcctacttttcaacgcactactcgaatttctttgggtagccaaataggacgtaatgttgaggcttatgtcgatgacttggttgtaaagacgcgcaaccaagagaccttactctcggatctagcggaaacttttaagagtctccgctccgcccgcataaaactgaaccccgataagtgcgtgttcgatgtacctgcgggcaagcttctcgggtttttggtctctgcccgaggcatcgaggccaaccccgagaagatacgagctatagagcggatgcgccccccagcaagcttagggatgtgcaatgcgtcaccggttgcatggccgccctaagtcggttcatatcgaggctgggagagaaggcgctacccttatttaagctcctcaaacgctccgggccgtttacttggacggaggaagctgaacgtgccctcactcagttgaaggcgtatctcagctctcccccagttctggtcgccccggagccaaatgaaccctagctactctacttagcggcgaccccgcaagtggttagtgcggcgttgattgtggagcgcgatgaggacaatcctcattccgcgcacccccaccctgtgctggcttggcccgggagagagcagggaggagaggcccccgagccgaacggtggcccaaggcccccgacgaccggagcaggccctctgcccgcttgtcagatggtgccaggtgcccccgacccccaggatggcccgagggccactgcgggaaggccgcacctatcgccctctgaccccgaggctaaccctgtgccgactcgacccgggagagagcagggagaagaggcccccgagccgaacggtggcctaaggcccctgacgaccggagttggccctttgcccgcttgtccgacgacgccaagagcccccgaccccctggacggccccgaggccactgtgggaaggccgcccctgtcgtcctccgaccccgaggtcgtcggcacagaagacgagtgcaccccgcgaggccgcttggacaaagagcaccccagggatgtggcccctagcgaagaggatcggccccaccgaaaggtgcagcggcccgtctactttgttagtgaggccctccgggacgccaagacccgataccctcaggcccagaagatgctttacgctattctgatggcttcgaggaaactgcgccattatttccaggcgcatcgggtcacggtgattacgtcttaccccctcggccaaatcctgcataattgagagggtactggacgggtggtgaaatgggcaatcgaactttctgagtttgatttgcactttgaaccacatcacgctatcaagagccaggccctcgccgattttgtggcagagtggaccccagctcccgagcccgtctcagtccccgaggccagctcgggcccctcacagctgcctcacaccgcccattgggtgatgcagttcgacggctccctgtctcttcagggcaccggtgcgggggtcacgttgacctcgccgagcggagacgtcctcagatatttggttcgccttgactttcgggcgaccaataatatggcagagtacgagggactccttgcgggactcagggtggcagctggactggggatccgccgcctcctggtgttaggcgactcctagctggtcgttaaccaggtctgtaaggagtaccggtgctctgacccgcagatggacgcttacgtgcgccaagtacggcgtatggagcgccattttgacgggatagagcttcggcacgtgcccagacgggataacacggttgccgacgaactctcacggctcacttcctcgcgagcccagaccccaccgggcgcctttgaagaaaggcttgcccagccgtcagcgcgacccgaccccttaggggagacggacgcgcctgacaggcccccgaagcccgtcggagtccaggcctcgggacccgaggggagcgctcccagctcccttagattgattgcttggatcgctgagatccaagcatacctcacagataagactctacccgaggaccgcgaagggagtgaacgcgtccaacgcatctccaaacgctacgtgctggtagaagggacccactatcggcgcgcggctaatggaatcctcctgaagtgcattcttcgggaacaaggcgtcgagcttcttgccgatatccatgaaggcgaatgcggatcccactccacctcgcgcaccttggttggcaaagcctttcgacaaggtttctattggccgacagctctcaatgatgcggtagacctggtccggcgatgcagagcgtgtcaattccacgccaagcaaatccatcagccggcccaggccctgcagatcataccactttcatggccatttgctgtctgggggctcgatatcctgggaccgtttaggcgggccccgggcgggtttgagtatctgtatgtcgcgatcgacaagttcactaagtggcccgaggcttatccggtcgtcaagatcgataagcactccgcacttaaattcattaagggcatcacaacccggtttggagtgcctaaccgtattattacggataacggcacccaattcactagtgaacttttcggcgattactgcgaagacatgggcatcaagctctgcttcgcctcacctgcccaccccagaagcaacggccaagtagagcgcgccaatgcggaaatcctcagaggccttaaaaccaagaccttcaacatcctcaagaagcacggcgattcgtggatcgaggagttgccagcggtgctctgggcgaaccgaaccacgccaagccgagcaaccggggaaacgcctttcttcctcgtctacggcacggaagcggttctcccatccgagctcaccctgaggtcccctcgggccaccatgtactgcgaggctgatcaagatcagcttcgcagagatgacctcgactacttggaagagcgaaggcggcgcgcggccctccgagccgcgcgctaccagcagagcctgcggcgctaccatcagcgccacgtccgggcccgatcactctgcgtcgacaacctcgtcctacgccgcgtccaaacgcgtgctggattgagcaagctctcaccaatgtgggagggtccgtatcgagtgatcggcgtcccccggccgggctccgttcggctggccacgggcgacggcacagagttgcctaacccgtggaacatcgaacaccttcgtcgcttctacccctaaaaggggatcgggtgtcaggtttcgggctcgggccaaccccgcacccccctcgggcgtgcagggttggccgggggctaccacatatgcatattcttatttctcttatatctgtatttcaataaaagcattttcgatttcctaaaggctgtatctgtgctgttgtttccttttgaaggatcttgacttgaagtaggtcactcgtgttcaatcctgccctcgggggctcgggtcggctaaaatcgccaaacggggcccagaaccgagccgtgccccggggcgtggtgaactccgggggggaatcggcaaaaacccacaatcgggtcacccataaccctcggtcaccacgctcccggcctggccagtctcgacatgtggatatccccaggcactagccccgacccgagccatttgaggactaggacctgggcacgagcccttgttcaagccaagacacaaaaggaccgcggcacagacatcctcgtctcatacacacaacaaatagaattgacacaaaaaatttcctctttatttgattgcagattaaattagtctatacaagaagggggcccgaaggcctcggaagaagaaaagaagaaactatttaaagattggcgggggcctgggggctcactccgatgcacccgggtcgccagcctcgtcgccactgtcgcccactccgccgtcatcgtcctcctcgtcggagttgagggcgaacgcgagccgaggggccgaaccctcgaagctgtggacgatatggtcggcggcgtcccggacctgcgcgcgcgcgacatccttggtcccgggagggaactcatccagcgccgtccatggggagaagtcgggatccctggcttggtaactcgccagtacgagctccaccgctcctcgggcgaggtccctcgaggatgacttaatcgtcctctcgagctcctcggggagccgttggagagtcccggctatctccgagaggcgctgggcgaggccccccaggttggcggcgtacttcgcagtccgcccgccccagaggcccgcctgccggccggcgcggtctagacgggagacggcgtcccgaagcatgccgggccctacctcgcctgccaagcggagggcctcaacctccccggcggacgagtctagcgcgccctgcaaatcggcgatggtgtgttcggcagctgcgaggcgggcggttaagtcgctttcgcccgcggccgccccgccgctgcgcgccctcgcgtccagctccttctcccgcgcctcgagctcagcggcccgctggttcagcgcggccctctcggcgcgggcaccttccagattacggcgcgcttgttcctcttgcgcagcctcgcggagggacaggctgtccgccagctgttgcgccgcggcctcggcctcctcgagagctcgctcccgctcggtgagcgcgtcctcgcggaggcggagcgcggactcttcttcggcacaggcggcttcgtgcaccgccagtgtgacctcccgaatagcaacggcggcctcgcgatccgccaggtccctctccacggcgcaggcacgctcttctagcgccatggcacgggcctcaagggcttcttcgcgccgccgggatgccacctcggtctccgccgcccgccgttctcgggcagcggcagcgtcaaggaccccccgggcggcgtcgagctttttccctagctccgcctcccagctcccatattgaaggcggagggtgtcctgcgcctcgttcatcacggtggtggcgatgagggcagccccccgctcctcctccacctccttggcgatctcccccatcaccttccgacgggcttcgagctctgagacgtgccggcggtgtgccttgcggcccacctccaccatggcctccaccgagcggcgcccctcttcgacacgtgcccatgcggcgtcgagctccacccgctctgcttgcaaggcctccatctgggcacttaacccgtccaacaccgtggtgttagcgacggccaaggcctgcagaagaggttctgcgctcagtggagcaacggaaggcgtggggaagagccgcctcgaagaggatgccgcgcggcttggcccgccgatggacgtgccggactcggggatgtcccccggacctggtttgtcctgagcgtcgcacgagggagtgggcccaagcgatgcgcccgcggcctcgtcgcgagctgcttcggaagtcgtcgtcgcctcggcctggcgaagtctggcctcctcccgagcggcttcttcagcttggccagctcggacggccacctgagcagcttcctcggcttctcgaaggcgatccgtggcctcttgccggtcagtttcacgggtcgcctcggaggatgtcgtcgcctcggcctggtgaagtctggcctcctcccgagcggcttcttcagcttggcgagctcggacggccacctgggcggcctcctcggcttcccgtaggcgatccgcggcttctcgccggtcagattcccgcctccgagcctctgtggtcgccgggtcctcggcctcagactggccggacttgggatggcgggagggacgcgacgggatctcgctgaaacagaagaaagaccagaagacaaacaagatggatgagtgaaaactcgcgttgagggaatgaatacggccacgatgggcgtgggacgaacctgcgagggggtcggttaaacgaccaccttggaggggaaataaggtttccccgagatggttctgtcccccacatcttgcggggccgtttcttcttccgctccccctcgggctgcgacgtcggcgtggccccctccgggcgcctgctgctggcacgcgccgccccgccccctcgtggaggagatgggggaggggttccttcctgtttcctcttcccccgggcgtcggcagggcggccgctccccgggcccctgtcgcggggcccagaaccatgaccccctcccggggtagattgttcccccctgcggctcccgcccgcgccatcgtggcctcgaggagcccgctcctccgacgccccgaccgcctgcatgatggtcaggatggaggcgcggtctggatcgctgcagagggggaggactccttgaggaatgagggatgcctccacggagctgagattcagcacccgttggaccactatcttgaagtcctcaggagcccagtcccatctgactccctggtgagtcctcatacagtcctcggacccggtgtactcccaggcaccccgggcgcgccgctggagtggcgcgatccggcgacgaagatagtcgccgtacaccatggcccctgtgagccccagggatcacaggcccgccaggcggtcgaggacggcgtcatagccatctcccagatctaccggcgcccgccagctggaggcctgcgccgggggctggctcggaagtcggaggcgcgcttcgtcagctaggggggtgtagaaccagtcgctcttccagtcatcccacttcttgcggaggacgcagggaatgtagcggttcaacaccggcccccgcggttggaagtagcagccaccaaccaccgacggcggcgacactgactgtacggtgaagaaccaccggaacagccgaagggatgggcgcaccccgatgaacatctcgcacaggtgcgcgaagatggccaatgtcattaccgcgttgggggtgatgtgcgccatctggagatcgtaaaactccagaacatccatgaagaaagaagaaaatggcggaaccagccctgccattgcaaaagggaggaagaagacggaccgccccgggtagcatggcgctgggcgtccctcgcccagcgtaactatctcccagccggtggcagattccggcatgaagcggcgcggcagcccggcctgcctctcgctcacgatgcgggaaggcggcagcacgctaccatcaagcaaagcggagccccgtgccatgacgccggaggaagagatgtttaagagcgagcgcgtgtggcgaaggtagggcacaggaaacaaggagttagggcgcaagcggcgaagacaaggggaataatggcgagaggaaggaagcaaatctcttcctcggcgactttatacccttgccaacgctgtgcccggctcctcgtttctcgcgcccactatcttgccccctcgtttctcgcgcccacgcttccactaatcccattcgcccgtttgcggtgcatgaggtggacatgcggctgtggcagtcgagatggaacatctcgtgcgcgcgttaattacgctcgccgaccgaagcgccatcaccatatctccaggaaaaacgaaccggattgtcccgatttttagaccggccccaccatgtcaccaggccttaggaagtggcgtcacacccgaccgcttccctcgaggagggcgatcgccctggcataacgccaggggctactgtcggtgacatgggaccgggagtatcatgacttagagacttgaggcagacacgatcacccacgtggcctaaccccctcgggggggggggggggggtcgggcccgagggtgatacggccgcccttctctttgtctccccgaggggttggaccgctcccgtctcggccccgagggccgaggcgccccgaccccttgtgggttttgcgccgcgtatatggggtaggtgagcatagcggggctcacctaaccacatttattgcggtttggacgagcgcgtcacgccgcatgtaacgcagtgcagcgcgctcgtttatccggtcagtgaccagtcacagaccgatcagatcgtgggttaggtggcgacaggcggtctgacgcacgcctcgccccatcctgtcaggacgagagcctccaagcactcgtccctagccggagccggcgtgttagctcctggagatggcacgttggttccggtcagatatatgccaggcttcatcctaaccattacaggcaagatattgtatgaagaagggcgaacatgcagatttatagactgacgcgtggtggacaagaatgaccgatttgtgaccggtctgacactggtcatgtcgtcagcagacagccattttcccacgtcgcgcctgcttccggcggaagtggaggtaggtatgggctgtcccatcagaaggtcattcggacggcaaccatacaagtctccgtctgtttatgaaaagataggataagtccccacaaaaaagagagagatggtgcatgtggtatccccttgaggtataaaaggaggaccttgcccacttagaagaggaggattttcggatccagaaagatcagagagggagaaagtaagagctctctggttctccagctcttttgtagcttcttcatacacagatccaccaaaacacaggagtagggtattacgcttctcagcggcccgaacctgtatacatcgcccgtgtcttgtgtgtttccactctcgcgaaccttccacactcagaccaggagcttagaatctcacccagggcccccggccgaaccggcaaaggggggcctgtgcggtctcccggtgaggagccccacgctccgtcacctgccatcctctctcccccttcccttcttcctcctccctctctctctccccttcttttcctcttcggctgtctacagggagcggcggcggcggtgggcaggtgcaggccagagcggcgactacgggcaggcgagggacggagagcggcggtggagggaggtcgagagctagagcagtggcggctaggcctacgatggagggggacgccgcctaagccatggttgtggattgcggcacctagcagatcccccatgacgcgccgccgtggtcggctccgatgaaaagccatgcccccacgccacgccccatcaagagaaggcgaggtgggggtcgaccgccacaaggggaaggaggcaagctcggaagtgcggaaggaacgccaatagacggctcgggcaccggcgacgctcgcgaccagatgagtgggatggtgccggacggtggacaaatcccgccattccttcctctcacggcctccacctcaattgacgcggtgtgggggcactacggctgacgacggtgcgcaccgctctccgttggggccgacggcgcaacgcagcattggggcgtcgtggccgacgacggtgcgcgtggatctccgtcggggccgacgacgtgaagcggtgtgggggcatcacgagtgatggcggtgcacgcagcgggcggcgaagggagagcttgtccaacacctttggaagcagcttgaacgcgccctcggtggcagcggagctgttcttgtccgggtgcaggacgaggcagaggcagcgccctcaggcacggtgccccctggatccagtcgttaggtcctcgttgtcgccgccaccgctgccctggatttagccattgggccgtcacgccgccaataagaagaatggaggatatggagagggagagggggaagagattattagaggaaggggatgacaggtgggcccttttaaaaaatactagtatttgacaactaggataccacgtggacaccacgtcagggaaaccactctccaagaacatcgagggagtcaaattacaccgtttcaataatagttaggggatcgatatatccggtattgcggttcgagaattcaaattagatttggtcactagttaagggagtcagagtgaacttattccttgggcctaagattgtagggttccatatgagactttgggccattattggcccatggctctagcttcaatgtagtgtcattttgagttttctaccttcgtttcaatgtgtttgaattgtcaactagtttttgagaggcatccatgaccatgatgtagtgaaaatatacagtaaatggattcttgttaccatgtactccataaatattgtgagagatgttaagagttactatcaagatatggcacaattattgatacgaagagaataaaatatgttatggtaggtcctaatttttttaatcgtaacaaggcacgcggtaagcttagattagagggactcatcttatttctctccccttcgcatagacacgttgtggtgtccatcttaccagttacttttcctgacaacaggtttacctacattgtttgttgtccggtttgggaataactatggttgatgtccaaataattgttacagtatttaactgtgatggggaaatgtttgtgtttattatgacgaccgcgagaaaactgaaataagacaaagtcttgatattatttttcacacatatttcaccatttttacaacaaaccccatattgatgtcatggctcacgcatcttgatattattattcacacatatttcaccatttttacaacaaaccccgtattgatgtcatggcacacgcatatcatgtatccatgactatgtacagattaacacgcccgatttatcagaaacgcggcagaaaaataactgatgaaaaactccttcagaacattaagcaagattcactctagttcacaacttagatcacacatctacaccctatagaaatcacatctcacgtgatgacgcactggtcagttagtaggaagcaacatcgtcgaggtcgttcatcttgaggtggaggtgcctctgcgcgaaggcgtagagcctgaccatctcgtcgcggtccacgacgccgttgcggttggcgtccgcctcgcgcatcgcctccctcgccttccaccacgcgaaccacaggttgaggctgcgcagcgcgcgctccagctcctcccgcccgatccgcccgtcgccgttcgcgtcgaactggctcagccacgccctgaactcctccaccgtcgtctccccctgcggcagcgcccggtgataccgcatgaacgccatctcatacgatccccctcttaattaattccttctccctgcctagcttctctagttctcaccacaccgcgtactcctcctcttcgatctgtgcctgaattgtgaaacttctatccaatgtacagcagtatatccactgtcgaggcatgaacgatggctaagttgctttatatatggtgcccgattcagaaggcgcgagaggtttacagttcggtcgccgcacgttttgtcacgccggcggctccccgccgtccggccggcaggtcgtggaggatacgaggccgtggaattctggtgcattgttaggcaagaccgatcggtgcagccgcttgtttttttgacaggtaaagattcgttgcttggacaacgaacatcgtaagttcgtggatggtatgcatggggtgaagaagaatcggatgccaattcgcgcgttgatcggtaggcttcttccacctttgctgcggccagatcgacatggtgcatggtcctatatattgcttgcactcgaccgtcgttgatctggcattctattcttgcagcgatgctgaagctgaactcgtcttgtgatgggcaactagagaagcggtactactaataattgtgttagtcgcaaccaacggacaatgctttgatcgatttctaaaaggataatcacacaagcaaccatggccatatgcttagccattaggtaagcgttactaaggaatttcagcgtaatcctaacttgacgctgccttatactataagtaacccatctaattaaaccgttgttagcttaccaaagatgagacagaggaattagactattggttattgaacctccaaggtttcccacgtgagtgagtacctataatcgaggctgagaaaaccaatgagcaaagaatttgctgtatccacccaaaatctgaatacctttcctgtcccctgaataaactaaatataagttctcttcaggtatcactattctgcattaatcatcttcacgagaaaaggaaaacaatactggcaaatatttctattatctgaaaatgcaaattctaaagcatggttgtaatccacggatcaactttagtatttgcagtatcagaaatccctggaaatgataccagctgttcatagacctatattgatgcgtaggataaaattcttctattcagcatacatatatgtattaaaaattgataactattatgcttgtaggttcaccacatcactttcactcaaatttaagaaaagcacccccaccccctccatctatctattatattattaaaggaatagaaaaaggagcctccacgttcgctcttatagcctagaaattctcacattaatcggagaaaaagaaaaagctgagtccatatagaaatacaatttaaaaatttaaaaatagctgaaattcggaattaaaaaataaggaatattagaagagaagactagagtccatatagaaatacaatttagaaatagttgaaattcggaattaaaaaataagaaatattagaagaggagactagagtctatatagaaataaaattaggaaataactgaaattcggaatttaaaataaggaatattagaagtagagtatagaatccatatagaaatacaattaggaaataatataaattcggaatgaaaaacaaggaatattagaagtagagtatagagtccatatagaaatacaattaagaaaaaaatagaaattcgggattaaaaaataaggaatattagaagtatagtatatagtcttatattattaaaggaatagaaaaaggagcctccacgttcgctcttatagcctagaaattctcacattaatcggagaaaaagaaaaagctgagtccatatagaaatacaatttaaaaatttaaaaatagctgaaattcggaattaaaaaataaggaatattagaagagaagactagagtccatatagaaatacaatttagaaatagttgaaattcggaattaaaaaataagaaatattagaagaggagactagagtctatatagaaataaaattaggaaataactgaaattcggaatttaaaataaggaatattagaagtagagtatagaatccatatagaaatacaattaggaaataatataaattcggaatgaaaaacaaggaatattagaagtagagtatagagtccatatagaaatacaattaagaaaaaaatagaaattcgggattaaaaaataaggaatattagaagtatagtatatagtccatataggaatttaaaactacctaaaatttggaataaacataataaaattaaaagtagagttttgagtctgtataaaaatataatttacaaataactaaaattcgaaattaagaaaaaacatgacagtttaaagtcaatataggaatacaagtaactgaaattcgaaattaaaaattaaagaatattgaaagatgagtttagagtccacatagaaatacaattagaaataataaaaattcagaaataaaaataaataatattggaagaagagcctagagtctatatagaaatacaatttacagaaaattcggaattaaaaaaagaaatatgaaaagacgagtctagagtccatacatgaatatatataacttacaaataactaaaatttgatattaaaaataattaataactaacatgtatataaaatacaatatgaatattacacatttgtagtttcgtaaagttgttgcaaaatttaaaattatgatgtcattttaatatatttgaataatataataagaaaacatatatgctattatataagagaaaatataatgatgctagccgcgtaatctgcgcggaccaccatgctagttttacatgaaacaacattcgtttgctccctgcacacctggtgacctgaaatgagaggtactaccttcattttaagaagatattattttagccaagccggtttaaaataaacgaatcaaatgtacacacaaatttacttcaaaaactttattgttggttatagatctgcataagttcattattagcttttcattaatgattctaactctgggaagcttcaacagtgattctggaatccatccactcggaaggtagtctgtgtagtcgctagctggtgttgtcacttttggagacttgttaggagtgtagtgcggctcagccccttcccgttgtttggagttttgctttaaccgccgtagtttttctaagcttcagttttttattttgctttttcttttttctcttggtataggccggtctagctgattgagttgtgtaactgtaactttttttttctaatatattgacgtgtaatcttttgcgtattcgcgagaaaagcttcaacagttatgcattatttagtacgacttgactcttgaccgaagacttgtgagaagctctttgggtccttcctaacagccgtatcaaataaaatcgaaccgagcccaccgtaccaaacgaaataggagtactagttgtcacttgtcagagctggagaattgaacaagaagttgtcctaacaaatttaaataaaaaaaactgccattggccaattatgactgtaagattacagtttgtttatatcacacatttatactctctctctctttctctcttcaaagttacgggtttgtcctaactcagtttttttttcgagtttaactaaattcataggaaaacgtagtaacctttacaataataaattagttacattaaatataccatttaatacattttttgtattattttttttgggggtaaatatcattatgtttttatattaacttagtcaatttttctttataataatttgacgaggacaaatccaaaacaacttaatagaatgtagtacaaacacatagaaaggaaaaggaaaagagttgcttttacaaaagagccaactttatatatgttatatctaagtgagactagttaaaatcaagaaattagaggaaaaatggaaatggtaaaagtggatagaatatttcaaaccattcatgtaattatactccatccatcctaaaatataaaaatctagtatcagattagacattttatagtacaacgaatctgattaagggtgtgtttagttcacgctaaaattgaaagtttgactgaaattggaacgatatgacggaaaagttggaagtttgtgtgtagaaaagttttgatatgatggaaaaattggaagtttgaagaaaaagttgggaactaaaccaagcctaagctttctttttagattcatagtattataaaatatctaatccgatactagattttaccgttttgggacggatggatcgaatagatgatatgaacaattgaatactacgatgcggatgcacagctgcaaacactgtaacgatcattttttttgtgcatgatgataatgttattgtaactgccgcaacaagctgcaccgaacatgttcatagtttatactcgcctctttcaaaatacatcaatttatggttggacaagacatatgatttgttcagatccatagtaacagaataagctgcaacgaaggtacgagtagtactgtagttaacagttgccttaaaagtttacaagtgatattactccaacggctagacaatgaagtgtgaatgatgagtacgccctatatgtgctggccgctgaggtatacagtatatgggccaacggccacatgacgaaaatatttattgacttgaattggttcctacacttcataccaacttgttgcttcaattatccagctttggaaactcgctgtttgtttcttggttcgattaataatgagcccgacggttcgacgtactggagctggagaatcctttaaagcacaacaaggtaaggagaaccaggtcttgccttccgctttagcagaggcataaacaaaggtctgtattcccaagcaatgtatccctccgcccctcccgacgcgtataacaagtacagcgccggtgctccaccgacggcgccgccgccggcaacgtaccagctgccgacgatgaacaccccacgcaccggcggcgggctgacgcgatggtccaccggccttttccactgcatggacgatcccggaaactgtaagtccttcagtcagtcagttttcccacatgttcttcagagttcagagttcagagcaatagatggttgccggcccatggttgctcaatcacacctgtcgtttctctcatgcaggtctcatcacatgcgtgtgcccctgcatcacctttgggcaggtcgctgacatcgtggacaagggcacctgccgtgagttctcccttcttctccttcttaccagcgaaagattttggtccattcaccagcttgttcgttgattcggtgcgtgtgaaactgtgatcgattttgcagcatgcctcgcgagcgggacggcttacgcgctcctctgcgcgtcggggatggggtgcctgtactcgtgcttctaccggtccaagatgagggctcagttcgacctggacgaaggggattgccccgatttcctcgtccatttctgctgcgagtactgcgcgctgtgccaggagtaccgggagctcaagaaccgcggcttcgacttggggatcggtaggtgcaagcactgaagcacagtagattcttcgcttgcaagcaagaaatatcttctactagtactacttttttgaggagcactcgaactgacgaatagtgttttctggtaaggttgggctgccaatgtggacaggcagaggcgaggcgtcaccggagcgtcggtgatgggagctcctggcgtcccggtcggcatgatgaggtagacgaagatggcgaacgcgaaatggtgcgcttttgtgttcttgtgttgcaatatgttctctgtggttttcatttggagatcactgcctatttcatgtatcgtatactcctatttagcttgatttgttgggtttcatgtaatatatgacgcattcagaagtgttgtgacttgtcaagacacagtaatgggatttggtgagagatcgaatgagcacattggaattaggctgttattcttcctcctcctttcccaactaatatatctcgcacgcacacactttataaactgctaaacgtcatttttttaataacaatttatatgaaagatgctttcaaaataatcgtattaatctatttttcatatgaatctattatttatgtgctaatgagttactctgttttatggatggattagtttccatcccaaccgacgaacgcagcctaattattcctgccaagaacagaaaagagaaaattcttgaaggtatcaactgcaagtagagtgatttctgttctgcactcctgcaaatttcttcgctgggtgagaaaatgggaggaagggagaaggcgaacaggccaatccaacgctggtgcggtcgggccaccccaatcaactccccgggcccactaaacagcccaaacacggtactagaccgaccagaccgcatgaactcgtaaggaataagttcacttcatgaccctcaaaagtgatcgaaatataatccatgaccccaaaccacaaaaccggatatcttgactcccaaactcttaataccggtgcaatttgactccttggacggttttgaagggcggtttcgctgacgtggcgcctacgtggcagtattgactcggtcttctttctacgtggcgttgacgtgtcgctaaggtggcattagaaataaaaaatatgtgtgggacccatctgttattcacacacaaaataaaaagtggggcccactaacatgtgggccccacatatcatcctctctctcactacccttcttcctcctctctccgttgacatgagccgccggcaagagggggcttgagtgccggtggtggtgggtgggtgccggagtggtggtggacggtgtacctccggcgacaggcgcgggagcagctccttctaccacactaggcctcgggcgacggtgggcggtggacggtggggagtatgggcggcgggagctaaagaggcggcgatagacggtggggagcacgggcggcgggagctaaagaggcggcggcggcgacgggctggaccgtccggctgctgcccgccccttctatctcctcctcgtagtcgtcggcgtcgacctccccgaccatgccgagtactagatcgagaccagccgtccgccgccgctctcgtctctgacctcatcggctgcggccatagccaccacccacgggacgcgtcgccgccgctccgggtaagcacgcggcagcgctgtcgcgagcgcgagtgcgggaggaggcaccggcggcggcggtggcggcgacaacacgagctcggcggctccgcctctcccctctcccttctggcccttacacaccgctgccgcctctctcgtcacgcatcacatccgtttcctccctcacctgctctcctctcctctcctctctccacttggcgaggctgtcgccaccgcttcagcttccgccgccgctctggcccccgcccgccgccgctccagctccagcctcccatgctccccacggccggccgaaggggagaggagaaagagaaagaaagagaaaagggaggaagaagaaagggagagagaggatgacatgtggggcccacatgtcagtgggccccacaattttttattttgtgtgtgaatgacagataggtcccacgcatatttttatttctaatgccacctaagcgccacgtcaacgccacgtggaaagaagaccgagccaatactgccacgtaggcaccacgtcagcgaaaccgccctccaaaaccgcccagggagtcaaattgcaccggttttaagagtttggggggggtcgagatatccggttttgtggtttaaggtcatggattagatttcgatcacttttgagggtcatgaagtgaacttattccaactcataaacgccagaatcccacgcgtttcggcctactggacctttcattcgtacgggctcgtaactcttgtttagtgggccgtgtaaacgtcttgagaaaatccgcggcccctttcgtctcgtgtcgtaacactctcgtgcgattgcgatctccgccaatgctcctttccccgcacgaggccgtgccgtgtgcgcacgagtgattcttcgtcgcaaccatggatgccgacgacgagacgaggccaatctttctggatttcttttacctggcctcgctgattcggagacgctcacggggtgtttagatggggctaaatttttttagcccaggtcacatcgaatgtttggacgttaatttagagtattaaacatagactagtaaaaaaactaatttcgtaaataagagttaatccgcgagacgaattttttaaacctaattaatctataattatcaaaagtttactgtagcatcacattattaaaattatggcataattagacttaaaagattcgtctcgcgaattagttcaatgttataaaatgagttttgtaattagtgtatgtttaatactctaaattagtgtcaaaacatccgatatgacaggaacttggaataagtctctgtaaaccaaacagccccggaagtgaacaagcggacaagccatgtgagcggtgacatgatgcggccggtcacgtcgtgccggccatcggctcatggatgaacagtaggagaagtgggccaaaattacgagtttcttctccgtcctggatgccgcggcgtgcagtgcgtgctcgcaattatatatactcgatcgcgcctgctcggtgactctccggccgtctcaccgacgacggcgatgaagaggcaagagcgtcgtcaggcgagcacaccacacgcgttggtttgctgcgcgaacaaactcgatctaacgagtgcacagtgaagcgtggctagattcacagggaaaaggctgggctacttatgaagaagtccgaaatgaatacgctcctgtttgatagcgatctttgctgtttgcatagcacacggtgctagtagtactactgaaagattgaaaggaaacagcagcttgatgtgccattcggcggcccacattgaaaggaaccattggggaaatggcgtccgagcggccgaaaaaaaatcggacgtctggaacgatttttcttctaaactaattattcaatccacgatccgatcataccgttgtattcgttgcaactaaatctttataacaaaaccacatatgattatattttgataaaaaaatattttggcttttttattgatattttttaaaaaatgatgcatatggttttttagatgttttaaccagtagttttacgttgtttcagctagtgtactcgtgatgtttcactatatacagatcaaatgttgcaatggattttgatattatagaacgcgtcgttgcaacaaatcactcacatattttggagatcctctattaagaaaatttatttttttttgttccacaaaaaatgtttcacctggtgtactcacaatgtttcactatatatagatctaatgttgtagtgaattaaaacattccattgcaacagaaaaacccacatattttagaaatcccctattaagggaattcgtttcattttttgttccaccgaaaaatgtttcatctagtgtactataatgtttcactatgtatggatcaaatgttgcagtgaactaaaacattctttcgctatttgctgaaacattgtttttatataaggtgaaacaacatccgatttaaacgagtgaagcattttcgatctacttagtgcaacaattccgatatacctagtgtaacatcgtgtaacatttaaaaataattcaataactaggtaaaaaaatttcgtcggaatatattcatgtgtggtcttgttttgaagatttaattgcaacgaatttaatggtgcaatcggatcatgatttggataagtaatttaaaagaaaaatcaatttaaagaaagtttacacgtaaatcgggcgctaacgtcagcgcccgatttccacctctgatcgggcgcccgacggggagtcgtgtccgaatcatttcgttgcttctttatgcagttgagccaccgtttcttgatggagttccgctcgttaaactggctgtttctggtatactccacttggtagtcggtacttggtagttctcgtcttgtgtacctaaatgtcgtatgcactatgcagccagggtttagggaaggttactgtacttaacggtaagcctggttatcacattgaacagtgaaaagagcgaacgaaatattagtgaaatcagggatacacagttggtttttgtctcttaaagctaacgtgtattagagggtgcatatgtgagatgtgaatgtagtgttgcatgcccagtggtgcgtgtgcatgtactccatcatatagtcataaaaaaatatttttgtttaagtattttaaatttgacttaccgttacccctgtccctcgatgatcatccttaccttttggatgggattgccaccgaagtgagcaggcacggcggttgtgccgtgcctcctcgctcctgcactccctgttaaggaattgcgacagttgggtcacggctccgcgcactattcggttgccaccaatccccctaaatatatatatatgtgtatgcaagccattggtcaatgaaaattcattcatctcattcaatcctctcgctctcgctttgagtttcaacacgttatcagcactgcttgcgaaaaagaagagaagggagaaagaaatcaatcaaggaatcagtggcctccctcatcgacagcggactcgccatctatattatcttatccgtcgttttgtgatgccgcgccggggctaccgcattgcccatgtcacccaccatagagcccagatacggggttggtagctgccgccaccaccctagcgtcgcgtggtcaccgatgctgggctgatcaccaccccgctggcccatacattgccgaaagctgtgacgcctccaccgcgtccaagtccaaaacgtacaatattgtaccgtccagtgtcacactggagcgtctcttgcttgttgctctcaccggatttggagtcaccgtcggcttctagtggcgctgcccccactatcaccaactccacaaccgccacaatcaaatggaggcgaggagaggctgcaaggtaatatgttgtaatagaaaccttgatggttgcaccactatctagagtgtgcgtgtacgatttttcggtaaaagagaatacaattagtttttatacacacatgaatccttaactttatcactttgttttttccttttgagaataatagacgcttatatacacgcgtgcatactcaatgtagtgagcatgaacaaagtggttatatagaccattattgacaggtacacaattattcacttactaaaagttaattacataaataattaataataaatacaaacaacctaaatcggggactttaacctaatcatgccaccggtgggaacctaacaaggttggcggtttttcctacatttgcttctagcacaaaactatatccgggtccatttgcctgtttggtaactagggttggcaatagggcaggtcgggggtgggttggtctggaactcccccgcccttgatccccgacttcttcacccgaccccggccccaatgtgagatacggggccaaaacaccacctggccccggccctggccccggcccctccggggccccgcaataagagtgagcattccatccaaccagaaaataaaaatgcaaaacaatccatcaattcaacaagaatactagtacacaatcagcaattcaagaattcagcagcagtagtagttcgatttactccatccatgaactaaatgcacaaccacaaatacttgacaacagtagtagttgcctgtctgctgcccctcccggctgcttatcccgctcgttgccccactcaccacttgcacgccgccctgctcaccgttgtgccgcctcataccatagtccatagcagcccgcctgcgcacctcgccgtgggccgtcgccggtcgccgcgctgcctggtgcgtcgagggagaagggtggaaaacagagaccggagtcgaagagagaggggtggagggagaggggcggtggttggtggagcacatgagccgtggtcgccggtcagtggaggcgcctggagactagagaacgtgtggcggctgtgaggatagaggatagggagaggtgagaagtgaggatagttaggttttagggaggggtggattgggcttctcgggcctttactgtaatgggctgtattttaacctttcgagatctaatatacctacctcgggtccccgcgagtcacccgcgggtgcattttctcccccgtccccgcacccggccaagaccggggccccgacccggcccgaagccccacgggttgaaaactatacccgcccctgcccctgtaggggcgggtctccgcagggtcccggcccggtggggcaaattgccatttctattggtaacaagagtagaagaccataaagttttatggaactagtctccatgtgtctgcttgcagcattgcaggtataagacgccacatattattgttctagacaagacacatggcagcaagctaaaatacccagtatatgcagaaaaggccaaatgattacaggaggctgcctgcgcacttccattgcacttgcgagacggctgcatgactgcatcagatctctggacagaagacatgacaccaaacctcgacaaagcgaaaattacataattaaccttaattagtagagttgggagtacaaccactggccgtccaacacggaagcaacggtggattgcagcttatcagataccaactaccacagcttgtatggccaacttggtcattacaattagtttgtttctggcgttgaaagattccaaggtagtacttgttccattatcaatccacctaccgctatctaaatggagctcgagtaatattagtgatcccgaagtctgacacctatgaaaccgatgtaccatttgtggaagaatcaaatcacatgactttttggaagtcgtcttcttccaatcaattcacccctacaacgagcgaagaaccggcaagataaccacaaagccatgtgggcactgatggaaccctgaacaccacaaatggtcttatcgatctgaattggcggcccgagttaatcggatgctgttctatcacaacgagcaatacgtgcagcgatcgatccatctctctgaaaagcaaaaggagaaaaaagggtgcgaaagaacagcgtcgtccaaattaacaaaattttgaagggactacctatacatttgtcgacaaatttttccccaaaaatttgacagatgtaattatagtacaattgtagtgtaattacactataacttatatgtaattacactgtaacttgcatgtaactacagtgtaacttatatgtaagtttcacataattttaaatcgttagatctattacaagatttgttttggtgaggaagaaaacaaatcatagcacacacatatatgaaataatttgttcccacgaccttcattttaccgaaatattatgttatggagagatttttgaaagttacatacaagttacactatagttacagtgtaattacactacgattgtactgtaattacatctgtcaaatttttgcggaaaaatttgtcgacaaatatatagattatctttttttttctagttcgcactgctctttctctctaaattgcatcaaagaaaatagagagagagcagatggatcctatcccctataacgaacactcatttctatctattgatagaaaaggagcaaaatcgaattttgaatcgtgaggtaagtatcccgtgactattacaagtgggctcgattggcttggagtccgttgactgaaacaattatccgtctgaagaaaaagtaatcttgcaacaagctggccgaggcatgcaacttgcaaaagttgcactaaccctagtacttgtaagttggaagaagagaatagtaaaaattcatttttgggaaatcgagggccggagatggctgccagttcaattacgagcatgagtataaaaattgtcttctcggtcctatcaatgagaagttgagaaccaacgactaaacaacgatcataaaaaaaagctaaccactcccgcgcgcgcgaagaatacatgatgttggtgtacataaattagtgcacgttgcataagccaacgaaggaagcagtcaccgctgtgcatcgggcacacgtcggcatcatttcaaggcccccccgtagcttccatcactttgaccatctcgcctcgaaggaggagtaggaggaagagagaagccggcacaagcgagcccagcaaacgcacggcaccacggatcattgggatcaaaacacgagagcttaattgagaagcagagaaggagatcaagaaaagcagagcaaagccgccggcgaagagggaggaggtggccggtgggatggacgtgaagcgggcccggagcccgcgggctccgggcgtcgacgccgacgacgacaagaagcgggccgccgagtggcgcggcgccgtccggccgcacatggtgctggtcggcttcctcatcaccctgcccgtcctggtcttcgtcttcggcggccgctggggctccttccaaaccacctccgcccccaacgtcggcggccgccacgtcgtccccggcggcgtaacaacgacacaaagtaagtcccccttttttctctctcgtctcgctgtttgcgcttgtgaattctgaaagatcgcgtccatcgtaaggcaacgaagcttactcgttgaccgctagtgtgcaagcaagggaattttggtcccccggcgctctgatgagatcggcctatgaacaagcagctgttgtcgtaagcaattttgtaggtactcaccatttctgcagcatatgaggtagcagggtgaaaattggcatttcgtcggccggtgatcgctgatacgtcatacgaggataacatcatgttactacactggcattacgaccatagccgcaagcacacacgcatgttagttcgatcactgaaaaataattggaaaagaaaaactagatatagatcttgcattctcgcttgatttgggtgggacaaggttgcatgctagcattcagatcgctgatccaatgcatgagtaaacttttgggatgcatgcacagtccagaatcagatcctattgtgcattgtgcttgatgaacagtcagttctagttcggtgatgtggcgagcccgtgatgacggtgtcgtcttgatgccatcaccacttgtgcatccttttgcggatcttgtcctaccttatcattgtttcttccaaaggaggtactcctagcttctgtttgtgtcggtggcttttactgcatgccctgcccctgcagaatggcattccaaaaggtcatagctttctttctttattttatttgttttaacgaaggtcctcttggctttttactcgagtggtccctggatttactggagtagcagacaaacttaagcatcttgggaggcctcatgccctcgtgaaagtaggtggtccgagatggataatttctgccgtgcatgttgccagcaataatgctggtaacaacgctgttgagagtgatgacaaatctacaacaaagtaaacttttgttcctatatgggggctgttctgagaggaaaaaaaagtacagcacgatgtttattttgacaaaatggtactttgcattgtcgcatggtctgattattacagtgtgacactctgcattgtcttgtgcaaatgcctgaagaaacttttctgttaacttttctgcagaaaatgaagccccgaaaaacgtctctgtaccagccactgcaaccaaatctctgccccaaccccaggacaagcttctcggaggactactctctgccgcattcgaagaatcctcatgtcagagcagatacaaatcatctctctaccggaagaagtctccgttccctctgtccccttacctggttcagaagctgcggaagtacgaggcctaccacaagaagtgcggccctggcacgaagcgctaccggaaggcgatcgagcagctcaaggcggggcgcaacgccgacaacgccgagtgcaagtacgtggtgtggttcccctgcaacggcctcggcaaccgcatgctcaccatcgcctccaccttcctgtacgcgctcatctccaaccgcgtcctcctcatgcacgtcgcggcggagcaggagggcctcttctgcgagccgttcccggggagctcgtgggtgctcccgggcgacttcccccacaacaacccgcagggcctgcacatcggcgcgccggagagctacgtcaacatgctcaagaacaacgtcgtccgcaacgacgaccccggcagcgtgtcggcgtcgtcgctgccgccgtacgtgtacctccacgtcgagcagttccggctgaagctgtccgacaacatcttctgcgacgaggaccagttgattctcaacaagttcaactggatgatactcaaatctgacagctacttcgcgccggcgctgttcatgacgccgatgtacgagaaggagctggaaaagatgttcccgcagaaggagtcagtgttccatcatcttgggaggtacctgttccatccgacgaacaaagtatggggaatcgtgagcaggtactacgaagcgtaccttgccagagtcgacgagaaaatcgggttccagatacggatcttcccggagaagccgataaaattcgagaacatgtatgatcagctgacgaggtgcatcagggagcagcggttgttgccggagctcggcacggcggagccggcgaacacgactgccgaagcagggaaggtgaaggccgtactgatcgcttctctgtactcgggatattacgagaagatccgtgggatgtactacgagaatccaaccaagactggcgagatcgtcgcggtgtaccagccgagccacgaggagcagcagcagtacacgtccaacgagcacaaccagaaggcgctggccgagatctatctgctcagctactgcgacaagatcgccatgagcgcctggtcgacgttcgggtacgtggcctacagcttcgccggcgtcaagccgtggatcctgctccggccggactgggacaaggagaggtcggaggtggcgtgcgtcaggtcgacgtcggtggagccgtgcctccactcgccgccgatcctctcgtgcagggccaagaaggaggtcgacgcggccaccgtcaagccgtacgttcggcactgcgaggatgtcgggttcggtctcaagttgttcgatagctaattttttggagaagtgacttcttcggtttcacgttccgaattgcgttcgttacgtcacgtcctgtggattaactaggccttttggagattcgttatattcgtttggactcgtatacacctgaaaatgcacaaaatgtattatgtaaaatgtattatgtatctgtattcaaattcgttcttcataaaacaattcggatatatatatacacacacgcaaacagattccctctccagtttccttttcagttcgattaaattgacatctctacctaccacacagattgctactccagttgcctactccctctgtcccataatataagagattttgagtttttacttgtactgtttgaccactcgttttattaaaaaaaaatagaactattatttatttttttaacttactttattatctaaagtattttaagcacagctttttattttttatatttgcacaaatttttttaataaagtgagtggtcaaacaatgaaaataaaaactcaaaatcccttatattatgagacggaggaagtacatcacaatgattcttttttttttgaatggcaccggggggaaaactccccacctgaattaaaattaaggaaacatcaaaactttacaaaccatacaagaagaaaagaggaagcaaaacagcacgaaagaaaagaagaaagaaagaaagagagaaaacaaacaagagagattacagaaggtggagaggagaggagaaggatgcaagccaagacggaagaactgcccggtcagccagcttgaaacggtttgcccaaagcttggcgtcgttgacgcaacagcagagaagacggttgatggatggtgcaaggtgttggaaaacaacttcgttacggtggttccataagcgccagcagcacaagaggaagaaggtgctgtttagtcgttccggaaggtctccagaccagtggatggtgtgaatctcactcagggaggttagcatgggtagcacctgaatcaggccccaaaaagcatatgccagggggtaggcaaggaagatgtggtcagtgtcttccaggcaggtattgcatagttgacatgttggggaggggatgattgacttcttgtgcaggttgacagcagtaggtagtctgttcatagtcattaactgtcacgccccgaactagtcccgaccggaactagcccgtgacgctccaaattaatctgttaatcgataccagtcccaggaaacagtgctggtatcacagggagacagaatatcacagcaacagaggtctctttattatagagtagatgtacagtcatgttgggctgcggacagatcccgagctcacaactgcattacaaaaggaaagcggaacccaggacttggatcaatcaacacaggcgcgacttgggaactaggccgaaactctaaaactcatcgtagccggcttgctcctggaagaactcctcgtcagcaggatccgcttcatcttcttcagcaactgggggggattatttatatagagcaagggtgagtacgggagtactcagcaagccatgggaagtaagtgtttaatgcaggcttcaaggaaaggctggtgtttttgcaattaattttatttgaactcttttctgaaacaactaagtgagtgcttctcaaacgacacggatgagacagtgcgtctcgtccggtcggagtatgtgcaatgtatcagtctttagaatttaaacaaggttggcacccggccaacagctttttcaacggccacccgggccaacaacttttcaaacggccacccgggccaacaacttttcaaacggccatccgggcctagctgatcccatcagctgcagatttttcaaacaccgaacccccttttcacacagcaatttcacaagcagtagtcaaaccaaactacgctaggaatcacctcacatccgcccatgaccgtgggcacggctgttcgaacagtttgttaacctctgcagagggggtacactttatccacacgacattactaacccggatcacccagcctgtggggatcagccacgtcgggagacctccaagctttcatgacaaggcatttccaaagccgacacaggtttaccatatgccgacgagaggggtcccagaccaacaacaggttaggtcccagaccatactgtgccaggaagcccaggggtcctctccgacaccaccccggcgaatccacatgtctctcggcatcaaggctcccctgataagctagttactcagccaggggtgtcccattccacccatgtggtcgtacttgacttatgtttggatgaaattccaaggaatcggtccataagtgcgatagcgggaaaccgtacacccggtacatttctcggtccgcggttttggaaattcatttagttcgcaagcaccgacccaggtgtcgggttttccaagtcttttgtaaaactccagttttacccaagttgttactcagattttaagtttgaaggcgaccgtcgatactggcacagggtgcacgaatatcgaggcgcaactggatggttacaaggggacatggtatagcaattaacaatggaaggatcaaatgcaacaagttaggtaggtctgccaatctgccttgcagacggaacaacagattaagtgcaatcctatcaatgcataatattttgcaagcaatataattagatttcaaatataggctcaagatgttcaaaggtggcttgccttgctcgagatctggagcttgaccctcgaaatcctcgcactgcgggtcttcgggctccgaaactatatgcaaaacgggacaactcaacaaacggcgaaaataaagccctattaatgacctctaagcgtgccattagatagatctcgagatttgagaaattttggaatttgaacggagtcaaacggatttacggttgggaagatattgaatttctaagattattggatttttggtctaaaggaaaaggatttaattaaatcctttttcgaaaagaaaataaaagaaaaagggagagggagggaatatagacttccctcgggcggctagggcgcggcccgagagaaagggcggctcggccgagcttaacgggccggccggcccaagaaggtggcccaaggcggcccaagacgcgcgcgcgggagggaggagagagagagctggtggaccgggctcaccatgcgcggtcccgggtgggacccgcttgtcagcggctcggctcaccgtgcggagggagtacgcggctcatgcgcgcgggcgggggagggacgcggtgcacgcgcgcggttcgcggtggacgcggatgcggcgggcccacgcgcagcctcacggctcgcggtggaacgcgcgcacggggagggactgaccggggtcggctcgacccggtctaggctgagctggcgccgacgtggcgcctacgtggctgccacgcgggccagcgggaggtagacgacgacccggccgcgaatggacggcgggcggcggcggcgagcggcggagcgaaccacgacgatacgggcaaaagctagcacaccgggcggttgttcgtgatgaggggagacgagccaacggctcggattcgccagagggagttcgacggcggcgaatcgcggcggcgacaaccggcggggagtgaagagggaaacgccgacgaggtcacgagggaccgattcccggcggtgagagcattcacgcgaccacgggaatccgatgctagcgtcggattggacggagctacgccgagcgaggctggcgacgtgcgggtgctatggagctcgagcggcgacggcggcgagcacgcggcgagcgacggcaacggtcggggcggcgccggctagctacagggagtctactcgagctactaccgaaagctagggggaggagatggggcgaggaggaagaacggagggaggcatcaccgagatgaggaggggcgctgtgacgagaggccgacggcgcgggagtaatctctccggcctcgggccggggaagaggaaggagagggcgcggccgaagtccccttccgcgtccttgctcgtgccgactccttcgacacgcgcaacaacgaacggcgacggcgaacagagcacgggggcggcagctatggcgaggaggcgaaaacgagggagattggaggggaaggagctggggtttaaagggggcggcaatgtcggtttgggaaccgacttagggcggtcaaggcgcgagctggcgctcggcggtcgcggccaaagcggcgacagggaggatgacgccagcgggggaaaagggggaaaaaggagggggagaaaggggcttgcccttttgccgattcgggaaaaaggaggaggggagcgggggcgacgcggcagagggaggaggggcgctgcctccgtcccttggcggcttgcgcgcggagtggcgggggccgggcggtgacgacggcgatgacggcgggcggtttggagcggcgtgacgacacgggcgacagacgcgtgcagaggctgacggcggcggcgaccgggcggtcggccactcggcacgcgcgcgcggcttgcaacgggcggcgtccgcgcgggcgcgcgcacgcgaacacggcgtgcgggaagcggcagcgagggagcggagagggaggacttggctcggcgcgggcggcttacgcaggcgcggcagagcgaggagaagggaagggggcgctcggcgcggcggctcacgcgcacgcgcgtgggcggagcggaggaggagcactcggcgcggctctcgcgcacgcgcgcgcggcgcgcgggcgaggcggagtggagctgagcggggggggggggggggggaaagcggagcgcgccggggaggggagaggacgagagagagagagagagagggagcgcccgggagagggagagagggagatgggccgagcgagattcggcccatcgacccgggggaggcaaaatagacttttgcggaggaatttgatttggaaggatttggattcggatttgaactcgacgatagatcggggattgagatcttgagatggcacggacactagacaacaagcaaagaaacaaatttcgcaattagggtttttaagagataatttttcccgctaggcgtcacgacggaacgggcgctacattaaccaaccaaaaaatttaaccctcggaggggccgagctcttccagatgaattcccaggggtggccaaagttgctgactttccatggttttgcaatagagggctgaagttgatatcaggccattgcggcagctgattgaactttgtattgtgtctttggtcttgtgagagtgggaagtcttgaagtaggtcttgcagcagatgtaattgttgttgagccactgttgacagtcttgggacaaggggtaaattaagcccagcgtggagcgctgaacgaaccgtgagatgagtagttgtgttgtgagagaagagggctgggaactcaatcgagagaggtttatcagtcagccagacattaagccagaagtttgttcgacaaccattaccgattttcatagtggaatgagctcgaaggaccggcagaagagtgattagagtgtgccagtgttgtcccagatcggctgagccgagagcagagttttggtgctcactccaaatccattttgtccatggggaattttgagaaaaaagccggtagatcattttagtgagcaggcagatgttttgcgaatgcagatttttaatttccaggcctccaaggcttttacttttgcagacgaggtcccatgctaccagacatttggagccatgacaagaatcctccccagaccacaggaacgcacgacgacgtttgtctatagcttcaatggttccttttgggagcaggagttcagccattgcataggttgggagagagtccaggacagagtttaccagaacaacacggcctgcatagttgagtaaggaggcttgccagcctgccagatacttgtcaactttcgaaatcatgaggtgaaaagcacttgaagggagttgagttgcagagagcggtaggccgaggtatgtttgggggaacccatcaagtttgcattggagaatcgtgtagtgatacacaatttgcacgcactgaccaatcgattaatttagagagacacttaccgtgggcgttgatgcttcgatgatgcgtttttgttccatcagcgacctaccccggccgtttgcacgcgcaaatcaaaccatcaataaaacccaacggaaacgccaagacgcaaaatgtccctgaattccatactaggagtgcctttcatgggtgcgactttcgaatggcagattgacagcgtgtacgtccacgtgcaccaggtaggtagacacacgccggccctcgtatatatacgtgcgttcatgtcgcgctcacatgccccgcgtcgcgccgggagcggaggcgacgagagaaacacgcagtcgtagaagcaaccggcaccagttgcccatgcccaaggtggaagccgtccacctcgctcacggtgttggacaaactgctggtgcctttgctgctgcatgttgcaatcatcctgagccgttgactgccagtacgtagcttccaacagttagctagagatttcgtaagcgtctggaagatgtgtaaacaaaagggatgataaggaattagtaatgtgatatgattttcatcgacgtgcaataattattatgcacgcgactgcaatcattacgtggtggtatatacgcgcaggtcagaggcgctgggggttcctgggagaaggcagagtccgaagcgtgcgttcacgagagcgcgcgtcggcgcggggtaccgatggacgagaagagggcggcgcggacgccgcgagctggagcgcggaacgcggtgaacggcggcgagtcgggatgttgcagcgagaaggctgcgcggtggggatggcgcgcgccggtggaggtggccgtggtcgggttcgtcgccaccttgacgttgctcgttctactgtacggcggcacgggaagcttgctgtcgttcacctcgccgaggacggagtttgtgcagaagcttgcaggtaaccgttattccaccaaccatgtgtgcaattgcaattgcattcttgaactctctattggtaaatgcatttacgcagttcgtgattaaaaatgtaaggaaaaagcacgaattacctcctgaactatcgcggacgtccgaattacccccctaaacccgaaaatcagacatcattcacccttaacttttaataccggataaattacctcctcgacctaatccagagcggttttgcctacgtggcgtacgtgtggtaatccagtcagcattttcttatttaaaaaaatagtggggtccacatgtcatcttccctcctcttctcctctctctctctcatcaacaagctgacaagcgtggacgacggggatgggcggcagctggaggaggcgtggcacgcggaggaggcggcgctggcgatggccgagatggagaagacaagtgccgcccggccatggaggcggccgaggcgggcagcatggcatggcgcacggcggtgcggggaaggcagcggtcggcgcgcacgacggtgcggccgacggtggcgggggcgatcggcgcggaacggcgcggacaggcaggaggcggcggagaggcggggacgatggggatgggtggcggactcgtcagcaccttcagcaggatgttgcggtcgaacaggatgttggccggcttgaggttgcggtgcacgagcgactccggcttggtctggtggaggaacagcagcgccgtggttatctccgccgagatcctgaaccgctggctccacgggatcgacgggcgacggcgtgccgcaatcttttttctttttatttttgtctctgcccgcttctgaattttctgatctgatttggtgccgcgttttggactttgggaatgtggttatgtgctgcatatgtagtatattggtttctctttggaatgttgggtaaaggattttgtcgagagctaacttgcacacttgtatatatgcatggccttaatttgcagtcgatggcttgcatcatcagtgattttgcagccgtccaccgaggcgcggcggtaccagcagccgccgccggcgtagctagacacgtacgtggtgcagatgcccaaggacaaggtgttccgcgtcccgccgccggagaacgcgcgcctcttccagcactacacccgccgcgccaggcgccacgcccgctgctcctgcgtccgcgtctgctcctggctcctcctcatgctcgtcttgctcgtcgtcgcgctcacggccttcgcctccgtcgtctacctcgtgttcaagcccaggcagtcggactacacgctccagggcgcgaaccttctcgtcggcctctcggcattgcgccgccgctgcgcctccaggtcggccagctgctgcgccgcctctccgccgccgcccgccagtccgcgccgttccgcgccgaccgcccccgcccaccgtcggccgcaccgccgtgcacgccgaccgcgccgtccactgccttccccgcaccgttgtgcgccatgccatgctgcgccgcctcggccgcctccatggccgggcggcacttgtcttctccatctcggccatcgccagcgcgcctgctccgcgtgctgcgcctcctccagccgccgcccatccccatcgtccccgcttgtcagcttgtggatgagagagagaatggagaagaggaagagggaagatgacaggtggacccccaccatttttttaataagaaaatgccgactggattggcacgcgtacgccacgtaggacaaaaccgctctgaattgggtaagggggtaatttacctggtattgaaagttgagggtgaacgatgtctggtttttaggtctagggggtaattcagacgaccgcgatagtttagaggggtaattcgtactttttctaactcaaacatactttcgttattcggacgccaccatatgtgccaggttgttacctcccatcgagcttatcggctgcagtcaaaattttaaattttaaattaagttgattttgtgtttttcaatgtagtctatttttcaaattagtttctaaagtgctaaggacttgtttagattccaacttttttctttaaatttttaacttttccatcacatcgaactttcctacacacacaaactttcaattttttcgtcacatcgtttcaatttttttaaacttctaattttggcgtggaactaaacacagcctaataacacaaatgtaaaaattttatccgtaattatttttttcctttatattttcaccacttgtcaacaagcttaaacgaacagagtaacatgtttagaagatatacaatcaatttgtatatcgtaatctcgtaatggacatgatcaaaacgaggagacaaggcaatgtcacatccaacgaaagctagtttgtgcataagtatcacggaagctgttttctctcttgcggtatattattacacactcacacgctatgcacgttaagccggtggttcaagggttagcatcagcataatataaaacaattatcaccgtctaaatctacttttaccacttgaaagtcatgaagagcagtaaaggtatgacagatctaaactttattttcaagttaacctcgaccccccacccataaattgagcatgacattttgatcgctccgtgggctgttttcacttctcttgggctgctgaggcctatatggttaagccgtaaaacaatgttaaatgggccaaccatccagtattctggtatgaatgccaggatttcagtccagtcttgttcggttaatacctaggagaaaagaattggagggtattaattccacagctaaaactatttcccttccataaaaaaggttatttccctcgattcccctttataattctcttgtgtaagaaattaaccaaattcctaaacatgttggcacgacttaggattaatcatatatgagccgtatcccgtacttcgtatttggttgtacactagtagtaccacgtatcaatgctctctcgatttttggtgcataattcagttcaactgcaccgtgcagctgccgcagcatcaccttcccacggagcaccggaagacacgcccgagacgtcgactcggcacgacgacgaccgtctcctcggcggactgctctctccggccttcgacgagcattcctgccgttcccggtacacgtcgtccctctaccgccgccgttcaccgttccgcccgtccacctacctcgtcgagcgactccggcggtacgaggcccggcacaagcggtgcggccccggctccgcccttttccaggaagccgtcgagcacctgcgctccggccgcaacgccgcgcgctccgagtgccagtacgtggtgtggacgccgttcaacgggctcggcaaccgcatgctcgcgctcgcgtcaaccttcctctacgcgctcctcaccgaccgcgtcctgctagtgcacgcgccgccggagttcgacggcctcttctgcgagcccttccccggaagctcatggacattgcccgccgacttcctgatcaccgacttcgacggcgtcttcaccatgtggtcgccgacgagctacaagaacatgaggcaggccggcacgataagcaacgctaccgcggagcagagcctgccagcctacgtgttccttgatctcatccagtcgttcaccgatgccgccttctgcgacgacgaccagcaggtcctagccaagttcaactggatggtgataaagtccgacgtctacttcgccgccatgttattcctcatgccggcctatgagcgcgagctgacgcagctgttcccggagaaggaggccgtgttccaccacctggcgcggtatctcttccatccgtcgaacgacgtgtggggcatcgtgcacaggttctacgaggcctatctcgccagggccgacgagcttgtcggcctccaggtgcgcgtgttcccggagatgcccataccgttcgacaacatgtacgagcagatcatccggtgctcggagcaggaggggttgctgcccaagctaggacagacggtcgtcgtcaccgcggcgaacggctcgtcggtggtggcgccgagcacgaagctgacttccatactggtgacgtcgctgttcccggactactacgaccgcatccgcggcgtgtaccacgcgaggccgacggagacaggggagtacgtagcggtgcaccagccgagccacgagcgggagcagcgcacggaggcgcgcggccacaaccagcgcgcgctggccgagatatacctgctgagcttctgcgaccgcgtcgtgacgagcgccgtgtcgacgttcgggtacatcgcgcacgggctagccggggtgcggccgtgggtgttgctgcggccgccgtccccggtggcgcgcgccgagccggcgtgcgtccggtcggagaccgtcgagccgtgcctgcaggcgctgcctcgacggatgtgcggcgcggcggaaggcagtgacattggggctctggtgcctcatatccggcattgcgaggatgtacaaaaaggtatcaaactgtttagctagcgctttaatctgtctgcgtaatttgttcgtatggtgtagaattcacagtgaaacataagtgctgagttctgatccgctttgcgtggccactaactcggccgctacagacatgttccgtgcatgcataattccgctaatcctcctgttcaacgtacaccactaggtgtgcacgcatgcagttccttgaccaattctcacatcaaccacgagcatgcatcgcacacatgcataaccatgacacgacatgattatttcgagcagaggctggccaccagcgggccgagccgcggagaacgaggcgaggcggtggggaaggctccggcgagcctccgcgcgcgccgcgctggtgctctgctcgctgacgatgattccagtcgtcgtcgtcctccaccggtgtgcggtctcctcctcctggccggatcgggttttcgaagccaagcacatcgcgggagccggcgagcaaggtacgtacactcacaaaagtcccccagctactcgatcgctgggtcgcaccacctgtcctatacgcccctctgaacaaattcgctctagctgttcgcacgcatccgtggtcttgcttgattcggtcgccgtttattatgctcggtataactgattctgtcggcgatgaatcggcgcgtcgtatctgcccgcgcaacagcgatggcttttgtgatttcgaagaggtggagagatgctgggttaagcacgagctgtaacaggctaacagcttggaaagcagaaggggatcgaaggcggcatgaaccttccttggagcgatcgtgaaaagcagattccattgcccctctcctgcttgtattggttgcgctagctttgtccaatctgaagtggagttggtcacatttaacggattcgcgaaaccatacacgagccagagaaaataatttccacttgagaaatttcagatgtcgatatgtcatcgtactacgaggtagcgtcatataggcgtggttaattaaccatcgacccatcatattgggttgggttttttttttttaacgactcgcacgagacggtgcgaagttatattgatagagtagaaaaaaattacaaggttacaccctagagggtcgtaaccagaaaaaaggaaaaaaaaataaaccaccacccacacggcgacaatgccatcacacaagcccaggagaaggctaacaccggaccggccgccgctaagcgtgaccgaccgccagtaggccaacaaagggacacagacgaggttgccacctaggggatgccaaaacgacgtcttcaagaagagaagcgacggagaaaccgccgccatcgtccgtcaggactcaaaagagccaagagagggctttcgcccggcaatcacccttgaggggtgagacagcacgacaacaccctcatgaggggggataaccattgtttgtcggtccgaccatggctggactgggttttcatccgccgctcaccacttgcgaatccacgcctgacgcagcgatgctccaccaccacacaagctttgccgacatgtgggacccctgcaccggcgtcccccgtcggccagtcttcgtgcgccgaagaccgcgccacacccactggcagctcctcctcacacctaggtcacctcctccaccaccggacgcgccactctgcgccaaaccggcctcctccaccagacgcgcctcgcgccaatccggtctccctccatcggccgcgcctcctgcgccaagccggcctccatctccgccgcccgcgcctctcgcaccgagccggcctccgctgtcatcggctgcgcttctctgcgccaagccggtctccgacccctccaccaaacgatgccgcgccggctagatgtagtcgcctcccacgccctcagctagccgtttgaggccgccatgccttcagtgaccgcagacacagtcaccaccaccgcagccgctactacctaacgcccagccacctcgccgtcgccagtcgccatcctcgcctcgcagccgactccttccccgccgccgacgtcgccaccgcctgcacaaacggccgccgtcgccgctaccatcgacgccagccctcgtatctgcaacctgccgctgtgccatcgcccttcaccagcatgcggctggccgccgcccgatgccatgtgcgccactgccgccatcaccagccaacaccgcagccgccaactgccgcgaccgccgctgccgtcgccaactgccgccgctgccgtcgcccaccgccgccgctgccgtcgccgcaccgccgccgtcgtcgccgcacagccgccgtcatcgttgcacagccgccaccaactgccgccggccaccctccagatccggccgagaggcgcggatctgggggacaccgtcaccgccgtcgttaccacaagcccacacgggaccaccaccaccaccttcgcgcccgcggccggttccgtccccgccaccatcgccatccccgccgccttcagccgccgccgcccggcgccacgcgcccctgccttcgccgtcgccatccccgccgccgtggccgggtcgtcgtctcccgtgccgccccaggggaggacgacgcgagaggtgtatacattactctatgcatctaactatggagacgtcaaaagtcatattgggttgggttgttgacacttgacaattcccgcgaatgatcctccgtgttgtccggccgcccgctctgcattttcctgtacggctgggcagtgggccatatgggggtagaatgacgcgcatatggatgccagtctgccagatcaaaaaaaaaaacaaatttctttcatcctcttctttcgcttttttcaattgagatccctactgcacatacaacctgcatccaatttctttaccttttcttggcagatgacaaggaactacagtactcctgtacaacccaaaaatgactcttcgtttccttcaattatgttgtaacccctgttttcaactctaattatgatttcactaatatttctcctgcttttttttctaactctgtccttatttttctgaaatgaagcttgtatttatccccattacgttaaggtgatataataggataaacttcatgtataaaccattttactcgtttcaacatgatctttttacttattcaattaaaaaaaagtgaggcataaacttaacataaatctgtccactgttttgacatcaatattaaaacagttaaagatgtgttcgggaggtgaggacctcccgcgcacgtagaatggagcgacgtattatgattaattaatactttgcttttttaaaaagaatggattaatatgatttttaaagcaactttcgtatagtttttttttcagaaaatatatcgtttagcagtttgaaaagcgtgcgcgcgaaaacgaagggaggtgagttaggaaagttagggaaagaactaagctaagtcgtcattttgacgtaatagtgcaattagaaggttcatttttatatagggagaaatcacaaaactaaaaggagtaaaaatcataacttgcgttaaaaatgaagataaaaatatagaaccgctagctccttttatgtttgaacttgcacttacgtgtaggtgtggtatatgtgcgtaggggtgtgcgcacatgtagtcttccatcatgtaatcgggaaaaatagttatacatagagggatgcacgtgacattactccttccgttttccaatatccggtaattttgatttctccttttaaactttggccattagctgtctttaattgttatgtagaagttaacaatagttgtatgattaaatttaggacatacccatttcaataacatggcatcaattttagtgttcataaatattaaaaatgaaacgagtgatccaaaagccaaatgtgtcctgtataataactaaacgaagggagctaattaatactccatgattatgaacatccatgatcaaaactcgtaggactcatttgaaacacagaattgaataaaaaagagaagtataaaaaataatacaagattttgattaagatattttgttttgcttattttgataggagtacaatcgcaaaatagagaactgcaaatatatggaaatcactgtctgattaagctgttggaaaaacataaatcagaaatcggatgcgagatagactgatagaaaaatttttaagaggttagagttattgctagtaagtttttttttttttgccaaatttcacgtgcaacgactcaatgagccattctacagggattttataggattaaaaaaatctccaatcctttatactacctccgtcccataataattgtatttatactcttcaaattttgtcctacaaaaattgtatttctgataagatgagacccacaaatggaatttgtatcccaaccttccttttaattaagtttacatatggaatgtgtgcctcaacctttcttttaacaaagtatacatatgaaatatatgcatgcaatgtagttattaaatagggttattgtggtaaattgtgtttgttgttaatatgtctctaattccctagaaatgtaattattatgggacggagggagtatcaaaaggtcaaatagaaaaaaaaatctatagaaattaaatcctatgatttttttctcacaaattcttttgattcaaattggccctaaaaatgtaagggtgtgtttagttcacgctaaaattggaagttttgctgaaattgaaacgatgtgatgaaaaagttgaaagtttgtttgtgtagaaaagttttgatgtgatagaaaagttaaaagtttgaaactaaactcggcctaagacgggatgtaaaattggacgaggagattacaaaattattacatgtactctactgtgccattacggtccgaccccaccaaccactactggctcagacacgttgtctacctccgctgcccgtgcaacttgcgccgcttgctgcgcccacgcgcagtcgcagacgcagccgatggccggctttgtttgacccccgttcctcccccccgtccccaactccaactgctcgcctagcaaagcagccttgcccatcgagacgcacatggagaggagcggcggcggcggggcggacggcgacgaggagcggctgccgctgcaccatgggtttgagacggagagggcggctccctgggcggcggcggagtcgaagccgccgccgccgccgcggggcaggttcgggcgcgcctccgtgcgcgccgcgctggcggtgtgcttcctggccatcccggccgtcctgctcctgcagcggtggcaggccgggtcctcgccggagtggctcttcgaaatcgagcccccggcggacggagaccgaggtgtgtatacatctgcttgtggccgtagctttctcctagcgccgatgaggccatgaatctagctagtgcttttaattgtagagttgtattggtagatttgtagtgtataaacagtagaattgtagattcgattgtactccacgagctattcaatttgcgctggtgcgggcccacctgtcagtggccgatccatccatccacatacagcttgttcgctggtagtcttgccaaatttcacgatccgtatgagttttgaacagcaaggcgttcgctgtagaatgaaggtcgcacttcagaaacttactagacaagaagtcatttggcgtgctttaaacgaaaacacagttacatcgttcaaatagaacgttcaacccagttacaactctttctttgttgaccgaaacatatacttaattctttgtcagggtctcagggagcatcactgctgtcctgatgtctcttgaggtcctaatggatgttctccacatgtttttcccttctcttcaatctaggactgttctataattcactgtggattaatgttgctagcacaactccactagatgccccaagagaacttttgtgtcatcactctctcaaagagtctagctgtgaaagaataaagttggttcggttctgattctcattattgctaattgagatttcagagatcaccttttccttctgcaacgcctctgtcacacaatggtcgttttggtctaagcatagataaggtagcaatcatttaaatcagcaactttgcttaaattgccacctttctttagtctaaaaactatacatggttcattcatataataaagtaaaatcatttaatctggaatgacctaaattatcatgattgtggacatactaccctggaactggaagagtgtgcaggactagaccttgctgaaacatgtccattttgttagttttagataaaaccaaattaggggacatcaaagagctatttcctccattacttctcatcttcctttaatctgatctgtcgaatttctgaaggacagctttgtgaagtacggactccacatggagcacgtgatttcttgcaatttgcaagatagttttgtgggtaaaagaacaagcattgcaataaaaattgtggtaggcttttagttgttcttctttaattctaaaaaaggaaacctttttgtggtgaaaagaacgaccaatcatttcatattaaatgcatgtatttaattaatcagaaagtggttgtgaaccagtcatttttgcatgcttcagtcagtgtagttcagaggacagtaactttatctgtcaagttatttggggtaatgttctattgcaatgacatacctctatcttcttcagatatgcaagatgatctgcctgatgatctaactgcatctcagtacatcggctatgacaaatttctgggtggtcttctgcaagagggatttgatgaagtatcctgccgaagcaggtatcagtttgcacggtaccacaagaacttcacaagaataccttcttcatacctcttagaaaggttaaggagacaagaagcattgcagaagaagtgtggtccaggcactaaatcatacaagcaagctgtgaagctgctgaggtccagtcagggcgtcaacatgacgacagattgcaactatctgttcttgacagtacatgctgggttagggaacagaatgcttgagattgcttcagcatttctttatgcactccttacaaaccggattttgcttttggaccgttatcaggagatcggtgaccttttctgtgaacctttcccaggaacctcgtggttaatgccttcggatttccctctaaactatggtgaatttactcagagtagcccagagagctatggaaacatgctgcagaataaggttgtcggtgacaatacagatcagtctctggctggttctaggcctccctacgtgttcctctaccttgatggtaactatgaattccatgacaagcttttcttctgcgaagacgaccaacagttcctgcaagatgtgccgtggttgatcatgagaaccgacatgtactttataccatcactatttcttattccaagttaccaagatgagctcagcaggctatttcctgagaaagatgctgtttttcatcacttggcacgctatcttttccatccgacgaatagcatatggtattcagttaaagggtactacaggtcctaccttgccaaagctaataaaactgtgggaattcagatcaggatatttgagaaagagggcatcttgcaaaaaaacgggcgatttccatatgtcttagaacagatcctttcatgcgctcagaatgaaaagctgctgccagaaatcagtatgaaagatgaagcagaagcaccgaccgcgcccaagaataaccagacaattgctgttcttacaacttctctgagctcctggtacagtgatcagatccagaagaagtacagtgagcacccaacagtcgatggaaccagggtagaagtataccagccgagccatgaggagtaccagagatcaaagaacaagaagcacaacatgaaagcactggccgagatctacctactcagcatgacggacgtgctcatcaccagtggcttctccaccttcggctacgccgcgcagggcctctccggcctgacgccgtggatcatgttcaggtcggagaaccacgccatgccggacccgccgtgccgccgcgccatgtcgatcgagccgtgcttccatcaggctcccttctacgactgcaaggcgaagaggaacgctgacctgggcaagatggtgccgttcgtgaggcactgcgaggacgtcagttggggcctgaaggttgtaaatcaaactcagtggtagctgtaaatttgtcgtttgctcgttaactagggaagattttttttctttgtccaaaaggactacacagattcattctttactccacatatatttgatccaaatgtagataactgaagaacaaaatagcagtaaagttgtgtgttacctgaacattgtttaccggggcatcatctgcgcatattgtctgttacatcagtgatcagtctgattgagtgattgctacaaaccgaacttctggtgtgcttctgcttggcaaggtgctcgctgccaaatcccaaatgggagtatgggaggcggagttggtggggaaaggcagcgagattggattggcgataacgctgttgccgcttcttgcggtgttcttgctcggtgagaatgtgagattggccgtaaacgattttgctaaaggtttgtcgcgtgatttttcgtcggaaatttgacgtttttctggccgtccgattgtgaaggatatggttttgtatctttaagtaacacgaagtgcttagctaagctgctgctaccgtcggccttggcttgtcgtaagctttgcgcagctcgctggcctggtggctggcacattacatatcgtatatcgattttgctcgtgattttcttctgacatttaacctttttttctggcagctcatcagccggccggcacgtcggacacaaacacgtcggcctttgtgtccagcctaagcacgtgcgatgatggagattggagaagcacagtgacaaggtggcctctgaccggcgagccagtcaccgccactacggtcaatgctgttcggcgagcgacaccgttcctctcatcgttgtcatgaaatataaaattacagtcctatataactaaaattacatttgtaaatttagttaatatgatatgtaaatgcactgtaattttgataaaaataatgtgtaagtaaatatgtatttgttattttctttaaaatataaaattacagtcctatataactaaatttacatttgtaaattctgttgatatgatatgtaagtgcactgtaattttaataaaaataatgtgtaagtaaatatatatttgttattttctttaaaatataaaattacattcctatataactaaatttacatttgtaaattcagttaatatgacatgtaagtgcactgtaattttgataaaaaataatgtgtaagtaaatatgtatttgttattttctttaaaatataaaattacagtcatatataactaaatttacatttgtaaattcagttgatatgacatgtaagtgcactgtaattttgataaaaataatatttaagtaaatatgtatttattattttatttaaaatataaaattacagtcctatgtaactaaatttacatttgtaacttcagttgatgtgacatgtaagtgcactgtaattttggtaaaaataatatgtaagtaaatatatattttttattttattttgtagtccgttggatgtaaatctaagggtagaaaaaatctgggtgattttttattagaaatcacctgacaaatggatagatgctcccggccgtaaatcgtaagtaatcaccgtgttgtattcgcgtcatagtctcaggttcttgggctcaatggaggatatgcgttagcccggcccatctacgtgttcgttcttgctgtcgaccgatatagtgggcctgcccccttctttgtgtttgtggatggaaaaagtccacttagactcccttaattgttcaccgaatctaattcgtggcccttaactgcaaaaccgggtaggacgactccccgtattactgaaaccagtgcaattttacttctcgagcggctttagagggcggttttgttgacgtggcattgctaacccggtcttcattccacgtggcgcttatgtggcattagaattaaaaaaatatctgtgggatccatctgccacataaaatatattgtgggacccaccgacatgtgggacccacatgtcatcctttatccttcccttcctcctccctccttctctctcttctctcccccttttctcttccccgttcgaacgcctcggcggcagcggcggccgggggccggagtggcgacggcgaccgcgccaccgcctgccctgtctccaagctggcctaccatcgcgcaagctccgccaggggctccgccgggggcgcggcatgggcgcccgcgcgcagcccacgccgtcgtgggcgcgggagccactgttcgagaaggccgtgacgcccagcgacgtcggcaagctcaaccgcctgctggtgcccaagcagcacgcggagaagcacttcccgctgcggcggacgagctccgacgcctccgccaccgccgccgcggccacctgcaactctgcaagggcgtgctcctcaacttcgaggacggcgaggggaaggtgtggaggttccggtactcgtgctggaacagcagccagagttacgtgctgaccaagggatggagccgattcgtgagggagaagggcctccgcgccggcgacaccatagtcttctccggctcggcgtatggccccgacaagctgctcttcatcgactgcaagaagaacaacacggcggcggccaccggcgacgagaagccaattacaagcggcgaagcaacacgcgtcgtgaggctgttcggcatggacatcaccggcggcggcggcgattgccggaagcgggagagggcggtggaaatggggcaagaggcgttcttgatgaagaggcaatgcgtggttcatcagcgtactcctgcccttggtgccctgctgttataacatcaaatcaattcatatatacatcataaatcttccatctttttgttgttcatcgcctgttgttgtttcatcttcgatttagagcggttctatcttcattttttttcctttgttttgcatagaagtttgccaattcagagattgcaaatgatcgatcgatcgtgccccgtctccaagctggcccgccatcgcgccaccgccagcgccgcttccgaacctccggtggaaggcggtgtacagagcttgcgcgatggcaggccggcttggagacggggcaggcggtggcgcggccaccgtcgccactccggcccccggccgccgccgccaccaatgcgtcagaacagggaagagaaaagggggagagaaaagagagaagggagagagagagagagggaggaggaagaagggaaggataaaggtgggtcccacaatttattttatgtatgaatgacagatggatcccgcaggtatttttttaattataatgtcacgtaagcggcacgtggaatgaaaaccgggttagcaccgccacgtcagcaccacatcagcaaaactgccctccaaaaccgctcgaagagtcaaattgcactggtttcagtaattcaggagtcgtcctacccggttttacagttaagggtcacgaattaaattcggtgaataattaagggagtctaagtggactttttcctttgtggatagataatgtggccctaatccatgcgctcggttgaagtgagcatatcgatcaaatacggacataggagtacgttgttttaacttttaactgagtttgctaagtagccatactgccatactcctgttagagtaaacatctctccacactagtacgagtacttaaaatatatgacagtcaaaatatgtctgttcaatctggaacatgaagcatgtgcagttaatgcgttcaattcaccacatggttaagcccaagcggcggtaaaaagaagtgtccggttttcaatcagtttacagtacaaaattagcaatctcgatgcataggattcagatgaacggtcaaccacgcaaaacgggcagcagcaacgcagatgtatagcttcgtagtggtcgactaaacaagtctacgagatgtgaaccgcggtctggagcaaaggcgcagcgcctagtcccacgcaaattaacctcctagtaataattttctcctcctaatctcctatagtagtactactatactgctagctgctgcgtttgtctttgcttgcagcatagtgcaccacactacaccgtccgctcagcgaaggcgatataacagcaatgcaggtgcagcaacgcaagcccaaggcttgcgccgagagcgccgcggcggcgcgaggagcggatcagcagcagtgcgacggcaggccgctggaggcgggcgaggagtccctggagcgctccgtgccgcggaagaggaagccagctgcggcggtggctgctgccgagaagcgatggagctccgtggcctacgtcgtgctcgccgcctttgtcatggcgacggtcttcgccgttcttggcgggcggcgccccgccgtctggatcgccgccaccaaggccctgcgtcgaggtgagtgtttcgtccttcttcccacgagcagccatgtatttcttgtttcacgagtcgcgctgacttcagctactactacagcatcgtgctcgtgcagttttgcactagtcagtgtacccgttattttagtcctgggctgttcagtacgcgctgaaactgaacacgacgatgcactctctcatgatgattttcagcgtggaatttcgcactcgctcttatgtactcctagtagatctgatcagcatgattttcagcgttttactcctgtttaactgcgatatttgtttcgtgtccaacgtttgaccgtccgtcttatttaaaaaaattatgaaaaaaattaaaaagacaagtcacgcataaaatattaatcatgttttatcatataacaataatgaaaatacgaattataaaaaaatttcatataaaacggacagtcaaaattggacacgcaaatatatggtttgacttttttttttttggacggagggagtatgttgcctgcaaaatgcacattattgtgattgagctaggtggccctaatatgaagtttcaggcagggtgggtaacttcacaattggaaatgtttacagcctaaaatttatctgggcttccttgcaccgttctaaggcccgttagatgtttggtgcacacgtgtatacggtacaccttacaaaatcgtttgttctgtgcaggttccgacgataaatcgattccattggcacgaagcgccgctgacaaactcctcggcggcctcttgcccgaaggattcgacgagaaatcatgtcgcagcaggtacgagtcatacctgtaccgccggaacccgggccgacgaccatctccgcacctcgtggcgcggctgcggatgcacgaggagctccagagacggtgcggccccaacacggagtcgtacaaccgcgccgtgcaacggctgagggacggcggcgccgccgaggccgacgcgcactcgccggacgacgagcagtgcaagtacgtggtctccatctcgtaccgcggcctcgggaaccgcatcctcgccgccgcgtcggccttcctctacgcggtgctcaccggccgcgtcctcctcgtcgacccgagcaacgagatggacgagctcttctgcgagccgttccccggcacgacgtggctgctcccacgcgacttcccgctggcgtcgagctacgcgaacttcagcgccgacaccgccgagagctacggcaacatgctgaagaacaaggtgctcgggacggacgggagtactgacggtgacatgcccgcggcgcagatgccggcgttcgcgtacctccacctggaccacgactacggcgacggcgacaagatgttcttctgcgacgacgaccagcggctgctgtcgaacatccagtggctggtgatgaggacggacacctacatcgtgccgtcgctgttcctggtcaccacgttccaggacgagctcgacgcgctcttcccggagcgcgacgccgtgttccaccacctcggccggtacctgttccacccggccaaccatgtctggggcctcgtcgcgcggtactaccgcgcgtacctcgcgacggcgcggcagctggtcggcgtccaggtgcgcgtcttcgaccaccggcaggcgaagtcgccgcacgtcgtcctcgagcagatcacgtcgtgcgcgtggaaggagaagctgctcccggaggtactcgacgcggtggaggacgcggccatgcccacgccaccgacgacgccgcacggcgggagcaacaactccaaggccgtcctgatcacctctctccggccgtggttctacgagcgcgtcaaggctatgtactgggagcgcgcgacggcgaccggcgaggacgtgagcgtgcaccagccgagccacgaggagtaccagcacttcggcgagaagtcgcacgacggcaaggcgtgggcggagatgtacctcctgagcctgtgcgacgtgctggtgaccagcggctggtcgacgttcgggtacgtggcgcaggggctcggcgggctgaggccgtgggtgatgtacaagccggtgaacatcacggcggtgccggacccgccgtgcggacgggacgtgtccatggagccgtgcttccactcgccgccgttctacgactgcaagacgaagcgcggagtggacaccgggacaatactgccccacgttcggcactgcgacgacgtgagctggggattgaagcttgttgatccgaatggaagtccgaactagtacaactgtataaggcttcatgctgcaaaagcaaactttacaaagatttcatttgcatgttttttttttgggccgggatggccgaagaaaagaccaccggaatgttattaaggttgagggaaaaattaaaagagaacaccataaggatattgaggtcggttcctttaattctagaaaccgcacaccaaccacaaatacagggatagaagatgtgtccccctcccaactcaggatttggatctggtgcagtcgttaatgtgactgcataagttgcggttcggatccaagagtcaaaatgcatccgggtattatattacactgtagcaaaacatatttactattttttacatcggcactataaccaatgatctggtccgttcatcaacaaaatggatggcccatattttgtgcagtagcttaacttgcaggccctattgaaattgctggcgatcccgaatctccgaactcatcttggaaccatcccctgcacacaaacacatgacactgagggaaggtatctagcactagggatgaaaacagagcggacacagatgaataatgctcataccgtattcgttttcatttttttttgctagatataaaaacgaatacggaaacagatacggaatatctcgaatacgaataagaatcgaatatgatcggacacgaatatggaaacatttttttctcggtacacgaaaaccaactcaacttctaataaaaacaaatatcaacatatataattacctcattttatataaaatgtagtataatttatatgttttcaaaaagttaaataatattaatattgtggactagtgttaatagatgaactactattaaaatctaaaaaggtataatgaagaccatagagttataaataaatgaggtatgtctcatggcttttgtggatatccgaattattatccgtatccgacgaaaaccccaatactttatccgtatccgaactatccgagaattatccgatctgaaagttatccgtattcgtttttctccgaagcggacgaaaactatccgctctgtttttatccctatctagcaccaaattgacctccgctatacatgatcgatcgttgttaggcctacaacaataccacatagcaaagtcttcaaatatgacgcctccacgttgattttacattaaggatgtgttgtattttgtttttcatgcttacatttgtacaaacctactccctccgtcccaaaataagtgcagttttaaactgttcatgttcaacgtttgatcatttatcttatttgaattttttttatgattagtattttttattgatattagatgataaaacataaataatattttatgtgcgactattttttttagtttttttcataaattttttaaataagacggacggtcaaacgttagacacggatactcacggttgcgcttattttgggacgaaagtagtagcatatactcccttcgtcccaaaatataagcatttttagactttgacatggtctttaagattatactttgaccaacaatatctacaaaaataagatgttttaaataaaaagggttgcatattatgatagttatgataaatctagtaacgtcaaatttacatgattgatagtttttatttctctgctattaattgttaaaattttaaaaagtttgacttagcattattttaaaaaatacttatatttcaggacggagggagtagcttatattgttttttttccgtttcccaacttcaactataatacgtggtaatttcctaggcagagagatagagagttgggggaagggggcgtccaaatttttccatgacattatttgtcctatcaatcaccttctatttatttttcttatcttaacttcaaccaccgttccgcttacaagttacaaccatctcttatgaaattatgaatatgatagtcttttcttcttatcctagtactcctactaagcaattcagaaatgtatgtatttgtggatggaggaggtagtatagttagagtaaattatttactgtccgcatcctatagtcctatactactgcagtttctgcaatctcaacttctcaagtactaccccatatcccattgaggaatcaacacaccgcacccggtgaggtaatccggagtacgggatagtgaaacaatttcaccgctgactaaaagctttgtccgtacctgcacacttgtaagcattcgaactgacgcgcggacgggggcagaccggcagagtccctcggcaacagcagccatgaaagctacacgacccttagagcaagtttaatacttcaattcatatatagccaaactaatagcttatttgtacaatagttatgtactatagtattaatacttggtcccacctattatacacactgtattctaaagttcgtgttatctgtaacccgctgctcttttctctccttatttatcttcttaaaatatgtttacagcttatttatagcatactattgtacgctcttactcaaaagcaaaatgagctacaggcacagggcaaacaaacagcaataaataccactgtagcaactagattagccaattcatggtgtacccgggcaacaagccgtcggcatcgactgtacggtgtcagagaaagagggcgtcagtgcgtcacacaccctagagagcccaaagcgaaccaaacccaaacccaccgccggggccgcatcagccgcgacgcacgctcgcctcatcaaccgcggaacgcggcgagccgctcgtccggcaccgcatcaccggaacacccgacgctgtcgcatgcacggcgccgagagaaaaaaagcgaaagcccccccccccccccacctgccggccacttcccgcccacgccgaggtcgctccgccccccgcccctttcaccgacgacgttgccaccgtgccgtcacgtcgtctcctctcctccgatccaaaccccaactttttttttgagttttttcgccccgaaaacccagcaaaaattcaaagccccctgtgtgcgggtgggtgggtcccacctcgtcgcatgaatccgccccgtttctatttgagccgaagaagtggctttcctcgttgccttggcctctgattgcgttgcgcctttcgtcgtgccacggcgtaacgccacgcgaagcttttttgacctcgcgcttttccaccgcgaacccgaggggctcgcgcgggctttccacaatccgcatggacctcaaggagcggatccgccgctcgccgacgcctccgacgcagggggaggagctactggcggcgtcgccggccgggccgcgcggcgggaggaagggacgggcggtggtgctgccgctgtcagccgcggcgctcgtggcgtgcgcggtcgtcctgctcctgctcgccgggggctccgcggcgcggaggggacagttcgtcggcgctgatcctaccgtcctcccatcacggggcggtggcgttggcgacttgcacctgtcccagtcgaaatcgaacgatggtaagaaaatgaaaatggtgtgtttgacagtttccatttttttttctgttggagttcacagcatcacgccgctctaggaccatcggttaattgaatgacaatttcgagggttgcgtgtggtgaagtgtggatcgcgacgtagcatctgggtgtccatcaggcgtgaactaaatgcttgtcttgcatgtcccttctttctgtcgtagtagtagcgcaagttctgaaaaacttaccgagctagtagtagtaaagaattttgcgtactgttttaaccttttggactttgcaatgttacaagttgttagattatctatgacttataatgtttactgaaaatttgtaatgtgagagcagtttattatcttcttttatcctatacatatgtatatgtttcattggtctgaaaaatattcatgcttggataattgatcccttcatcagctctatacttcgccaggttaactttaatacgatagtgaacgggtttccccccctttatctacaaactaaaagtacagttataacatgttgtactgattctgatataaatttttgtctttttgttaggagaaaatgtcactatagcatcttcggaagttgtcaacgacaaactactgggtggtttgttaactactggatttgatgaacaatcatgtctaagcagatatcaatctgtactataccgtaaagcatcatcccattttccatctgcatatcttctggagagactaagggaacatgaggcacttcaaaagaagtgtggtccacatactgaatcatacaagaaagctattgagcagctaaaggctggacagggggctaaggttatggagtgcaactatttggtatgggtagcttacagtggtctggggaacaggatcttgacaatggcttcagcattcctgtatgctatcctcactagaagagttttacttgtcgacagtgataaaggcactgcagatcttttctgtgaaccattccctgaaacatcatggttactaccgccaaaattccctattaagcagttcaagaatttcagtaatggttctcctgagagttatggaaacatgctgaaaaacaaagctattcgttctaaccctgcttttctttatcttcatatggctcatgattacagtgactatgataagctatttttctgtgaagataatcagcaatatcttcgaaatatcccatggctgatcctaaaatcagataattactttgtaccatcacttttcctgattccagcatatcaagaggaactcacaaggcttttccctcagagagattccgttttccatcacttgggacgttacttgtttcaccctagcaatgttgtgtggggcatggtcacaaggtattatgattcttatctagccagagctgatgaaaggctgggtatccagatcagagtctttgatcctgaaccaggaccatttcagcacgtcttggatcaggttcttgcatgcacgctaaaggaaaacctattgccagcaatcaacagtaaacagccaattgtctcaacaaggcattctagattaaaatctgtcctaatcacttctctgaattcaggatactatgagaagatcagaagcatgtactgggaacatccaaccacgaacggtgagatgatcagcttccaccagccaagccatgaggaacatcagaactcagacaagaaaatgcataacatgaaagcatgggctgagatttatctgttaagcttatctgatgttatggtcaccagtgcttggtcaacctttgggtatgttgctcagggtctcagtggtttgaggccatggctattattcaagcccgaaaaccgcatcgcacctgatccaccttgccgtcaagttttgtccatggaaccttgctttcatgctccacctttctatgattgcaaagcaaagaggggagctgatactggaaagtttgtcccatatgtaagtcattgcgaagatatgagctgggggcttaagctagtcgatcagagtgagtggtagatgtagtgtcctttattttgttcagttcatatatgtacagtatgtgccattttttttatgatataggttaccttgtatctaagttataggaaagccatttttgacatggttaacacaaatgcagtggtttgaaccactgcatttgtatacataatcccagtgatgttcttgtgagaaatttcagtatcataacaaatcacacaaatatgcagcagcctaggatcaattgctagggaaggaaatttccttttccataaacaattaatgtagttatgcatccggtgaatctccattttcataacacatggacttggcaattgcgtagtgagttacttatgttgtccacgaacattgtgaatgtgttgattgatagattaattaagatgaagaaaggaacaaaaagtttgacggtccaggatattttcaagaagaggagagggtgtggatgatatttttgttgaacgggtctgaaagatgtgtcaaaagattgtcgattggtccaacatgagtcacagatgcttgcacaataaacccaagcatagcaaccatagccaacctccctgtgacagtcgtagatcatgttagcaaactatgactattactatggatttatgttgcaagcaaactgtacttagagaaagtggagctaccattcttgatttctttcagtttcgcttcatctgcattctctatatccttggccagtcctagtggattaaacagtggacccccagggtagctgccaagattcagaatgtcagtagttgtagttaaagcagacaaccatggacttgctcaggtaaattgtttggatgcttcatttcggagcaaaattcttgtacttaccctggctgtgaacctgcaagtgcagcctcgataccaaggaatgttccttcctctgcttgtgatcctggattgataaagtccatgtacctcttggtttcagcaaatctgttgggaattggagttatcatgggaacatgtcagtcttatgatgtgtaaagtcatcaattcatcatacaatttgagttatgagttattgaagcttttcttttaccactgacaaaatgtttcagttggatgctgaattaccccatcaagagaagctggacaaagaagagtgccgtggtgttagcgaagtcgaattttgttgcacctgcttcaaaccacactggcaggttgttgattcctgatacacgtatcaactgcagagaacagtgacaattatttagaccatgcgccactttttttaaagataatgaaaatgttttacatgcctgacctcttccatagggcacacagccaatttagaccatgcgccataagaaagcataacataccatgaagctacctcaaaaaaagaaaagaagaagaagcaaatcatgttcttgtttggattttgtaattgggcaggctctgtttgaatgctatcaatctatatccatcccttttattttggctcgttgatatatattttagcttttagcgcactaaaaaaattgggttccgatatattcagatgtttaatattaaattatttcccttaaaaataataatattaaattcttgtgttacaatgttggtatattgggtttgatttaatttccactgaatatctatttcaacctgattagataatcccccgtatcattctttttttctcggatttatttgcacaactgtgaaaattcagaaaattctctatccatatctgtgaaaccaaacttccagtgttatgatttctcagggctaataactgcaaagagattacattggacgaggaatggacagaagatgtaagaaacttacatcagtcgcaaggatgccagcaacccctgccatcgcaaaccggcagtgcacaagttcggcttgaacataccatttcaagtttgccggttcctccccgagacccaggggatcaaatccgaaatcgccaggtaatctacaaccaaaattacagaaatgccgacttactgatcagcctactgccatcatcagacacagaacagaaaaacactattacagattttcaggtaactgacgtgccgtcgaggtgaggaggtggatcgagcccaggcagccaggtcgcacgctcggtgctagctcgcactgcaatccgagctcgtggagactgaaaaacatggtgtccaggaatggccgccatgcttctgctcaaagctgtaaccggctttggggagagtgtgcaggtgtgcaggactcggccatggctgttagctcctaacgacgccatggctgccgccgctgtaagattttggttgcttcagtgttgccgccgctgcaaggggccttcttggctgttgtttcttgggggcgtgggtggatggtggatagaaggtgtggatatcgaatcagagggcgttcacaaatttcagtggctacgagtttgttgcctgtccttgtccctgcttgcttttctggaccaagctggagaggcctggagctgatgaacatttctatgttttcatttcagcttacttaaatatccgtgctttgctaaggatgaaaataaattaaggttttcccaaatgaaataagatagaatcatatatgtagaaagattattttataacattaaaatatatagagtagttgatagaaaacatgatgaagtagttggtaaataaaaaaaaaattggtgatgtggtggcaaattcactttcatcacattgccctttttaaaaagagtatattaaataccggtgttttgctagggattaaaacaaattaaggtttttgggacaatttcgtcccaaatgaaataagatagaatagtatatgtagagagattattttatgacattaaaatacatggagtaattgataaaaaacatgatggaatagttggtaaataaaaaaaatactatacatggagtagttgctcttttttaaaatgagtatagatcaactggaaccaaaatttaaatttagaattgatctgggatatcttttgagtaaattcgattggtggcacagatattgtcctagtactaaaaaataacacagaaaatttatgcttccatttgaaagcacagctccgttaaaatcttctagtttatagcactcccgtctcctttagatataatggtgtaactagggatgaaattgccctcactgtcccacaccagaatacaccgatttcctttccctcgttccctctctacggcagcggtggcgcctactcatgccgcatgaccacttcgtcggctacccgaatattggccatccacgaataattgcggcggcacgggtgcggcgtccaggcccaacagcgcggagcttgtcccggtgggcactgtctcccacggagtcctcgctgacgccgatgtcgctgtgacgcccaaaatagcaagaacaaaagaaatgcgaaaacaacagtatcgttggttggctttgagcgagcaacagcagtagcagccagccaagccgcgcagtccccatccaacaacaaagtcgtcatcgtcgtggtgcttggcctcctcgagcacccaggcgtaggtgtcaacagctagcactgcagaaggcagtgaggaggtccggatccaaaagaatggcgaacgggctccgacgatagcggcgcggtcgaacgagctcgcggccgtggagacatggttgagcgggctagacggcggccacggcaacgtggccgcacgggatagacgatgccgtggcgtacaggctcgccgccatgccgtcgcgcttggagagaaacgaacaaggcagcagaaggaagatggtgaaacagaggtccttttagtctttctgcattccgattgctttgactaatggctaaactgacggaagtgctgtaaaatcgagaaaaattgacggagctgtgctttcaaacggaggcataaattttttgtgctattttctggtactgggtgaatagctgggctatcaatcgaatttcctcatatctttttcatcgtagtttactttcatcgttgaaatgacatggatataaaaaaaatcacaaattattttttaaactaataagcttatggtttatcagctatatacaaaacgattaacctggaattgttttgcacagttatatgacagccgacgaaacttttgtttaggtaaaataatagtagtatatggaattctggagaaagctctgttctgtttgctggtgatgggccgcagtgtgcgcggccggtttgcttcaggacgttggaattacctggacgctgcatactagatctagcagaaaatgtgccgattgacgtcattgatgtattttgtcaaaattaagctaataaaattggtgaatggctcctctcttcagccattgacaaattttgacatgataatttaatgcaccgaccaaaaaccattgatttgttcacaaacgagtaaacaacaacgtgtcagcagaatatactgttcttttaaaaagggcgctacaaacgttccattcattttaaaatcaaaactctaataattctccaagaagaatctcctggttgttgctgatccacctataatactattgattttgccctctactccatatttaaatcgcgagagggggtttccgcgtaccagaccagatgtacgtgtacgttcagtacgtacatctgtaaatacgtgtattaaaatcagacaagaccatcagtttccagtccctaattgagtctgtaccagcaagaagccagcaagctttacgtacgtacgatacgtggtggtttgctacaggcttcaatttggacggtcggtgactgcgcgttggaacatggaagcgtgacaggtcggcaccatctgctaccgatctgaagcaattctttgcatcggaccaggttcatgcaggatttcagatggtttacgttgtcttcttttctttttcttaagattgacaagacacgatgcaaatccaaatccggtggtcaaaacggtgcgagaaagtgactcgcgatcactcccagagttccaggccacagaaaagcttagcacgacgtgttgcagtattatttgtctaatgtttgaaaattcagtgagaaatatctcactgttactgttacatcactccaaggaaacagtagtaaaggtttttttttttttttttttttttttttttttttttttttgcggggaacagtagtaaaggtttaagaatcctattaagaatggaacaagaaatgaagcaacgatcgagcaatgaaatgggtgacagatcatcgatcatggcatggaccagaagctgccgtcgtcgagcatcatgatctcccgtaggccgtcccagatctcctggtccttcgccgccgccgccgtcctcgcgtgctctggcgcgtgcaccggcgacgacgcgttcgagccgcagttctcacggaggttgtgatggaggagtggacgtggctgctgcgcggccgtggacgccgggaagttgagcttggcgcgctggccgcggaactcgagcgcggcgacgtcgtaggcgcgcgcggcgtcctcggcggtgtcgaacgtgccgagccacttgcagacggcgcggcgcgggtcgcggatctccgccgcccacttcccccacggccgacgccgcacgcccctgtacctgctcccctcgccgccgctccgcctccgcggcctcctcttgcccacgccgcccgtcacgccgccgctggccaccgcgcccgtggtgcactccccctcatcctcctcgtcgctgcagctcgagccagccgccgccgccaacaccaccacctcgcagtccacgccgatgcacccgtccaccccgcacctggcgcacgtagccgcaccggcaaccacggtcgccatcgtcggctccggcagcagcgtcggcaccgtggtgtcaccggacacgacggagatgagcgcgcggatgaacagcgagtcctcccgctcgctgttggggagatggaacccgccgccgccgcgctccaccctcggcaccatggctgaaccaaacaaacctcggcgagttcggtcggtgtcacgcaaaagttggcgcgctatcgtgatccgggcgctgctgctgatggctgatggggtttggtctctgggtcggtttatatactggtgcgaaacggtgcatctccagcgagacgcacacggagacgacggctgctgggctcgcggggcacgttctcatcgtggggtgggaactggtgcggcacaagggagagacgggctaggacggctggattttaattatgactatgtcgattgggttctttgtctgttcatataccactatattgtattgccaagttggaagagtgctttaatttgctctaattttttatgaggaagaggatcacttgctctaagcttgcagtagtagcatatttttgtgtgattaagtaagatcgattcagaagcttaacacgtttatttcgtgatgttggtcttgggttttgttttggaggagtagaacataagggcccctttgaatcgtaggaatgaaaaaacataggaataggaaaaacacaggattctgacaggaatacaattgtaaaacagaggagtgcaaaacacaggaaaaacacaggaatggctgtttgattggaccacaggaaaaacgcaggaatcagatgagagagatagactcagaggaaatgttccaagaggttagacctcttgctaactttcctccaaaatgtgcataggattacccattccataggaattttaaaggattggataggattcaatcctttgtctcaaaggccttcataggattttttttccataggattgaaatcctccaaaattcctatatttttcctacaaatcaaaggggccctaagcttgtagattttgcatgtgctaattcttgcttaattcttgctaattcttgaaatcctccaaaaggaggtagtttgatcacaaaacgtgccgtgccatcctggcaaaaataaaaagactcgaatattagaaaaggaactaatatcaaataattaaaagaggtaaggctttgaacccagatcatctagcccatcatcctgtggagttagctggaagactcctagacatttctcaccatcctcacaaaaataaatcatgcagtactaataattaatcaatctgccagttgtcctcgaaaaaaaaatcaatctggcagctgttcatattttttctatgccttctataagaaaattaaaaaaaagtgtttattttctcaaagaaaaacttttgcctgacaaacaaagtgctgtcatgtaacaccctgaaaattcgaccgacaaaatcaaaactctaaaaatacggattttcaaaaactttttaaactaattacatcatgccgatcttattcgtctattttatctggatttgatctcgaagattattaatcgtgagtaaagaatagttaattaggaataaaccttaaaaacaaattggtaaaataaatacaaaataaagattaggtggatagaaataaataaaatattatcgcgaccatatttggatcaattaaatttaaatacgatggaataagaattaaccctaattaaaactcaaataaattacataaaaataaaatatgagtaatattaatctagggtgaattcattagttaagataacacaaatattgagtaaaatgcatatatgcaaaattaagaattgtggaatcaaatttatacggaaattacactaaaatcgggttaattagaaatcggcactattcattgcacctaaggtgttcgacgcgttcccctaacccagctcctcctctttccccctctctctcgtcgccagccgccacgcgccgtcgccctcatcgcttgccaccgtcgccatcccgtcgccgcgtgcgcgttccatcgtcgcctcgagccgtgccgctgccgctgccacgccgcgagcccgcgccgcgccgtcccatcgttgcggtcacgccgtgccgtcgtgtcgccgcccatcgcatcccgccccgagccgcgcgccaccgctgtcgccgtcgccatcgacgtcccgccgccgcgcgcgtcccatcgccgctgccgcgccgcgcgccgtctcgtcgcctcgcgccgcgagcccgcgccttgcgccccgcgctgcgccgctgccgcctgctgtgccgcgcgccgtcgccatcgcgtcgcatcgccatcgccgtcgctcgcgccacgcagccgtcgcgtcgcctcgcttcgcgcgcccccacctcgcgccccgcgccgccgtcgcgtctcccctctcccctctttcccttatttcttcccctctcccctataaagaccccggcctaatcccccttctccaccccactccatttcctcctcttctccctcttccccttctccacgcgctgccgtcgtcgcgccgccgcgccgccgctgtcgtgccgccgcgccgtcgccccggagccgctgcgccttgcgccgccgtcaccgtcgtcgccgccaccgccgccgccggtgagccatctcccctccttcacctcgcgcccaccgccgtcgccacccggggaagcaaagagccgagagagagagagggaaaccgagggagggaaaggataaggaaggaggagagaaaccgggagggagagagagaaggaaaaaaaaagaaaaaaaaagaaaagagaggccggcagataagagaaaaaggagagaaaaagaaagagagggagagaaaagagagaaaaagaaaaagaggagagaaaaagagggaaaatagaaaagaagaaaaggagaaaatagaaggggaatcgggggagaaattaagaggatttaggaaataaaaaaatggtcggggttaatcatagattatttttggaaattcctcgagcgtaatagtatttcggtcgaaattccgagttaattataaaaatatgtttattgaacagattagattaaaattggtagtaatttagatataattagtagctaaacaattagatgaattcttatagattattatagattatttttggtaatctctataagtcatcggttcacggtagaaattcggatttaattactaggaatcttatccgtgtattatatttaatcatttagtcatagactaaattaaattgtataatatttctaggatttcgtccgatatttagctcgtaatagaaatttctaacctattatatggatataatgctcggggagagtaaattaaaaacttatgacaacgaaataattatacccgcaaaatagtttaaatcgaaattgggtttgccgtagttcgcagatagtaaagttaataaaaaggaatcgactttcgcattcgactttcatttggattcatttggatttttatttgaattctaaccgaattcaaatcaattcttgcacgtaactatagagcccgagggagttgcggatccaagcgaaggccaagacccgcaagactttgagcaaggcaagtcatcactattccttgaacatgttgatcctaattgcgaaattgttttgtttacaaataaagttgcatgcaatgatgaacatcctacttgtgattatgccatgccttggttattgtttacccttaaatctttgtaaccatgtttacgtatgagtccctagtcaactatgacaaatgcttagaaatgctattctagaatcatgcatactcatatttgtcaaatgctatatgcttgggcaattatctttgggaaggtaattgagatgcggcatgtggagacatgagcgccacattgccatgatattgaggacatgatttgtgaaaggagaaataaactaaataactgttttcgactggggcggacggaggatttgggtggtatctggaaaaggctagtaccgtccccggtcaattaaggaccgagccatgaagttaagcatgaaacgaccctcgtacaaccgcacttctcatatgggtatagacctagcggagtagatagccgagcggaggcagtatccctgcatagatggttcacccctgagtgaggcaggtgcgctacggtgggacagccattgaggtagggccgagaggcatgccctacatcggtgtcgccattggtaggactgccatgagtgtgtgtgagagagaacttaacttgagccataatttaatgtgtgtgagacttctctttcccgggagcgccagaactcctctcactgctagaaacatggacgcctagagtgcatgaggatttaagttcatggagcgggtactgccaatgcgaggttatcaaaaggctttgccgtggcgcgtctcatgtgttgggacgaggctcatgtgttgggcagtcgcggagtgcgggtaaagtgtacatccactgcagtgtgagtaaaccaaatctatttgaatagccgtgttcgcggttattgagcaccgggacatgtattacacttggctagactctaaattctttaacttgtgtggaatgggatattgcatgatgatttttatgctgatggagccacttcctgagaggcgggaatgtggacgtcctcagaaaaccataacgactcaatgacgggaagctatcattgggatcacaatgggtggtggacagaaccgtcattgtttaatatgaacactggtattaaaaacttgatcactctatgctaggtcttaggcttgtgaaaagaattacaaaacttgctttgcgcaaaagaaccatagccatcctttgaattcctctgtcatgtgcatcattgctgtgatggcctgctgagtacggttggtactcacccttgcaaatataaaattaaccagaagcgggagatgaagcctcggaggatccctatgcctattaccaggagggagatgaagacgatggtgctcagtaggtcttagtacggtcgttgcctgtggcaatggcattccgctgccttatctatttctgcttttggatatattccggaccgctcggtccgatgatttaagactatgcctgcgggcttatgatgtaataattcgtattagacactcgtgtatgtgcacttggtacttcagctatgaattcgtgtgtaccagactacttgatccagggaaatagtactgtttacatgattgattcctgttataaaaacgggggtccacgtgtcaccatctcaccgaatggtggtgcggtcaaatccttgccacatgaacttttcttgcgtgtcctccttatccagctgcatggagccaccaaatggttaaatttgtaaataatagtccctccgtccttaaatatttaatgttgttgacttttttaaacatatttgatcattcatcttatttaaatttttttaatgaaatatgtaaaactctatgtaatacataaaaatatatttaataatgaatcaaatgataggaaaagaattaataattacttaagttttttatataagatgaacggtcaaacatgtttaaaatagtcaacggcgtcatatatttaagtacggatggagtatttctacatgtcaatcttactttagtttttagaaaaagttggatatttctaaatgtctccggtacacgtgtttggccattattttcttataagtactctacactgtactaccttattttcccactcagtaatactatttttctattaacggaaagaacttttgggctttgccccttcatactaatttaaatcttagtgattagaattggacttattttaagataaagatagtggagtagtatatattgtaaaaaagctaaattgcatccatgatacaggaatttgacttgtgggtgcgatttagcgatcaagtttatagaaaaattttgtaacatatgcagcccaaactagtttcattttatatgacattaaatatattttgataatatatttatttgggttgaaaatattgctatttttttataaatgtggtcaaatataaaaatgtttaactaataaaagttaaagcgacttataatatgaaatggaggttaggaggtaaatttagctatattttgaaatgggatgtagtcaaaattttcgaaagttggtattaggaagacaaacagagaagaaatggaaggagtgttgaaccatgtggtactattcacatgagagggattgccgacatggtcagcaaagtagtcacttctcataataagatctttaggagcacagtacgatccactactccgtaagcttcattttcatcggtcaatgccccttttgatttggaggaaaaacatagaaattttagaggatttcaattctataagaaaattttctatgaagctctttgaaacaaaggattgaatcatatccaatcttttgaaattcctatgtaatggacaatcctatagagattttggaggaaatttagcaagagcttcaacctcttgctaactttcctttgagtctatctctctcatcccattcctgtgtttttcctgtggttcaatcaaacggtcattcctgtgtttttcctacgttttgcaatcctctgttttacactcacattcctatcaaaatcctacgttttttctattcccacgttttctcaatcctgcgattcaaaggggccctaagagttgatagtgtacatctttaacaagtagcaactgtttatacaccggccacatgacgatttttttaagagcagtcaacacaagagaatctatcagtgtgaaaagttcataatatccacgcttattctccagtgtaaaaaacagtcattaattactccgatctgttcccatcatcccatgacggtgggagaaataaattatgaagataacatcattagctggacttacatcccaatcaaagtgttaggtctgttagtacatcgtaggctccggcgaactgaacgctaacaagatgtcaaagacgttttttttctaatgttgaatggagatgtcaaaagaccatttttttaatgttgaatggagacgtcaaagacgttgaccttgacaagcccaatatagaactcccaaactggagaaagtcatacccccagtggcacaagtagatcgatcgaaaaacatgtggatgagttgatctcttctacgaatggctgaagccggtcacctaccatgccagcgaaaaggcaaattttctacccctcaccgtcgtcgtctcgtggacgtaggtgttcagaaaaggatactactacatcaactcgcttgcaaatgttgtggtctcgtccatgcgttgctgtcaggtcggcccgtggtcctcatttgggcaagtcggctcggagacaacatagtaaattgcatctccgtcatgtgcagtatggatgtggcaattgccgatacttggaaaggttgatgtgaacctcatttctgaggctgcgtctctccccgcagaaatgagaggttcacttcctcttttgttgtactttctcagtttataaatatttcatataattaatttttttaataaacacattataaacataaatgttcataacacgcacgcatacacaccctacctctttaaacaccttcggaaaactaggttgatatatattgagattaacgaaatcaccacagctatctcatcgtcaatgggtacgtctaccacttaaagaaattagtcgtaaatacgagagcacctatatcaaggctaggatgtgaaccctagatgagttggttccaccaaatcaacctaactaatttgagctatactcacttcgcgatataattaattttgattataaaatttagttatttgttatatttaaaagcttaatttaaatataaaaaataagttatgcttgaagtacctttaacaataaacatgccatggtaaaagaatggtaattatatatataatttttgaaaaataagacaagtgatcaagcttaaacttcatagttaaaatcagttgcgtcaaatatttatgaccctattcttagggttttgtcttaactaatataatataggactaaaatgctcccgagaaaatatcacttacatgggaacatattctgcacacaagtcttctcgtgtacacaccctgcatacaactaaaaaatatcaaaaaaaatcttaaaaaataatagtactattacatatatatgtaaagtcccatattcaaaattattatatataaagagcaacaaaaaagataaaattatgacatatttacactctcaaaacagtcagaatttttttcttttttgttgtggctaaaatataacgaatttgaggttaaaactttacacataagtgtaacattattgaaagtacttctatattttttttttctgaaatttgctacttgatgtgtatagtgtgtatacgaaagttgtatgtataggatatgtttcccacttacatataatgaaccaaagactatgatgtaacttcctgttacgcatgaataaaaagaaccctcaataggcaaatgaggtcgggctctctcccccaactaatccatccactaaactgctcatactcactttcatcttctcctccccggcgtgtttaagcttgggttccctctaatggaggagagatcccttgccatgtccttactatacatgttggattttgttccaacaattatattgtttaaataagaatggacaatgtactttgtagtgacaacagagtgaggttgagagattaactatgcatgaacgcaaaacatgattgcatctataactataaaggggttgatagatgcagatatagttcaatgtagggcttcaatagcattaagcccatgggacatggaatttttttgtaagttgcccaaagtccaattaatggggtcccttgaaaaaaagtactatcaatcgggctgatggaaatgatggagtagtactttgttcagtcatgtgcacagctaaaatcacaaaatttgcttgtttgggcaacgtacgtcagaaacagtatgatcatcttgatgttacaaggccggattgcatgtgtgcaagcatgtactatataagataatgaaacaaccaagctagtaatagtaaagactgctattgaaatattgaagatatacacctggttttagtctaacacatctatgtcatatatacaaggagacacgttaatatcacacattaattgaacacctgcaaattttggagatgatcaataaaatgatcagtacacttcgactgtatatatcacggcaaaccctgcaatgaacttgagtcaggcttcatgaattcatcaggcttggcactggcagaagcattgctgttgctccagcgactaagctatggcaaaataatttattacctgaaattataaaaaaaagtgatataaatacaatacagatattttgttaattatacctgttgtaagctgatttagattaattgattaattcctgacatatgtggatatgcccgccgtgattgttgtacggaggattctagcatactcctcccattacataaaaccccaatctgaaatagtaattttaacaatttaacccttttaaaaaacttattttggtattgaatcgtgccaaaaactaaaaaaactaatttttggcatgcttcaatctttaaataagttttctaaaagaatcaaattgtcaaaattacataaaataaaatgtgatatttcctctatccaaaaaaagctactcctagtaaacaaatagaattctttatctagattcgttttactttttgaaccgagagagtattttataatataattaatctggacagatatggtagaaaatattatatcttattttaggttgttttttacgagaggggaagaagaagaagttggttagtacgtgcagaacacattcaaagggcctcctgtacaagaaagcttttgcagttgtgcaacgaaagatcgacgccttttgactcataaaggacataaagaacgatgaaggttgcaaccgcacggaacggaaataagctgatcagccgatcatttattactctagtactagtagtgttttttttttcttggaatacaaacaactcaattaaagagtctgtttagttcgcgaaaagaaaaattttaagtgtcatatcggatatttgatcggatgtcggaaaatgttttcggacacgaatgaaaaaattaatttcataacttgactggaaaccacgagatgaatcttttgagcctaattaatccgttattaatacatgtcggttaccgtagccatttattgctaatcatggactaattaggctcaaaagttttgtctcgggatttccgctataactgtataattatttttttaatctatatttaatgcttcatgcatgtgtctaaaattcgatgtaacgtttttggggaaaaaaattagaaactaaaccaggccaaaatctggatgaaaccatggctgagcagttcgtctggatttttttcttttttagatcaaagcctcaaaggcacaaaggccaggtggccctgcttttcttgaacgcagatatgtggtgcctgtctctgttctcctcggggcgcttctctgtttcgaccggaatgttcagtgtgcctcacggttcaccatagacttgtagccaaggccaagctgttccattcacaaaatttatcatcttcaatactctgtcatctgcctcgacagacgcaccacatcctgtgttcaggaattgatgtgctactgccatgcaaagtgccgcgttaaatttgccgaatcataaaagttgttgagattatagacatataatgatttaatctattccataaataaatcatgacattacagataaaaactagcatgaacgcatcattagatctacacatgtaaactacacagtataacatgaacagatcaaatatgcgcaacatattgaacacgtactgaggtgacgaaaagaccagctgcttggtcgaaacttttcgcaggtgtctacgaaggcacgaaacacgcgagcgaagaggaaggcgagccgtcgcgaacgaacagggagcagtcgcgcgaagcgcttcccaaaaaccttattgccgccttctcccggtgcagaacgtcaaaggcagaggttccggagacctgctctcccgatcgctggtgcacgccggcgagcgggatggagtagtctacgagcgacggcgcagtacagagtaggaggcaaaccctagattgattttgcgtatatactgcgtgaagacggcgggtcggtttatatagagaagggtcgcttgatcagggcacccgcacgatctctactgcgcgtaaccgaaccggataagtcgcgcgtaacttatccggactccacgccgtttgcacgcaccggatttttcggaacgtttccaaaacaaaaacgaatccgaatttgcagcaaaacaaaactgcaaaaggaggctgcatctgcgcaagggtgaggagccaatttttcggaccattcgacgcgtacgtcgtgcacgcgcgcctgccctgccctgccctgccaggccaggcgaggcgaggcgagcgagcgcgcgcgtgtgtttcccctcttctctccaccacacatgcttcaagtggctaggaggacatcctcccttttaaagaggtcccactctcctagaataagcaaggtggtactaaactccacatgcatgccatcccatgaggtgggcttttgtgattttccaaagaattaatcttcgagtgggctaaggcccattcattaattccaacaatcccccaccaaatctcaaaatcccactgagatttgccttttccaatgtactgtttatataccagcggttcgatggagaccaattaaggttgaacatccacctagaactccaagctacacttactcacaacttgaacaatggactacgccttgaattgcaagtcttgtgcaagcaagtttcactcaaagtcttatctggtactagaccgtctgtagactacccctcgggtggagcgtataagtcatactcctaggtctttagtaagcttcctagaagattcacccaaaatcttcatagactgcgaccaacagtcaagctcacaaaggtgagttctttcaagaatgctctgcaggacaacatcttcgctaattaaagccaacagaactcattaaggcatagccaacctgccttgcagctcacgagagtacatgcatcttcacttggagagggtatatatattgatactctcctctagtttactaatggtttgttcttcctaggatctaattcacgggatctccgatcacatagactgggttaccaccatagtataactcacatgggtctcaaacccatctccttcgatgcattgtttatcacatttcgtgatagtcccttcgtgaagggatctgccaggtttctcgctgtttggatgtaatccaacgttataactccggagtttcttaatttcctgacagacttcaatcgtcttttcacatgtctagacgatttcatattatccttagaactattcactttgacaattaccgtttgattgtcacagttcataaggatagccggcaccggtttttcaacaacaggcagatccattaatagatcacgcagccattctgcctcaacagtagcagtatccagtgccgttagctctgcttccatggttgacctcgtcaaaatggtctgtttgcaagacctccatgaaacagcaccaccacccagtgtgaaaacatatccactagtggctttgatctcatccaaatcagagatccagttagaatcactataaccctccagtaccgcaggatacccagtatagtgaagccccaattccacagtacctttcagatagcgcattactcgctcaagcgcacgccagtgatcatctcccggattagaggtaaatcggctcaacttgctcacagcaaaggagatatcaggcctagttgcactagccaggtacatcaacgagccaatgatttgggagtattccagttgattcctagcaattctcttgttcttgcgaagcaacaagctaggatcataaggtgttggagaaggcttactatcaatgtagccaaagcgattcaagatcttctccacataatgggactgcaagagtgtaatcccattctcacctctaattagcttaatatttaagataacatcagctactcccaaatctttcatatcaaaattttgagacaagaatgatttaacctcatttatcacctcaaggtttgtcccaaatatcagtatgtcgtcaacatacaagcacaaaataactccctcacccccaccatggcgatagtacacacatttatctgcctcattgactgcaaagcctgcagatgtcaatgttttgtcaaatttctcatgccattgcttaggagcttgtttcagaccatacaaagacttcaacaatttgcacactttgccttcttgaccttcaactacaaacccatcaggttgatccatatagatctcctcatccagctctccattaagaaaagttgtcttaacgtccatttgatgaacgagaagaccatgtgaggctgctagggaaagtagcacacgaattgtggtcaatctagcaacaggtgagtaagtgtcaaagaaatcttcgccttctttctgagtatagcccttagcaacaagccgagccttgtacttttcaatagtaccgtcaggcctaagcttcttcttgaacacccacttgcaccccacaggtttacacccatagggtcgctctgtcacctcccaagtcccgttagcgataatggaatccatttcactacggacagcctccttccagtagtctgcatcaggagatgcatatgcttctgaaattgacttaggagtgtcatccacgagatacacagtgaaatcatcaccaaaagacttagccgtcctttgtctcttactccttcgaggagcttcactgacatcctcctcagagacaagttcatgtgtatgttcagtttgttctggtggtgtgattgaactgggaattatttcagagggttggttcaaaccactatgtgtatccttcattgggaaaaagctctcaaagaaggtagcatcacgagactccataattgtaccaacatgcatgtccggtacctcggatttaactattaaaaatctataggcaatgctatgatgagcatatcccagaaaaacacagtccacagtcttaggtccaagtttgcgcttcttcgttattggtacattgactttcgccaagcacccccatgtgcgcaaataagaaagtgatggttttctaccaatccatatctcatatggtgttttgtccttatttctgttaggaactctgtttaacacatgatttgaggtcaacaatgcctccccccaccatgccttaggcagtcccgcggtgtccaacatggcattcaccaagtcagtcagtgtgcggttcttcctttcagcaatcccattagactcgggagaatagggaggcgtcctctcatgtatgatgccatgttcctcacagaataagtcaaactcgttcgagaaaaactctccaccacgatcagacctaagcctttttatctttctgtcaagttgattttcaacttctgccttataaattttaaaatagtctagagcctcgtctttcgttttcaacaagtacacatagcaaaatctagtagcatcatcaatcaatgtcatgaaatatcgttttccacccttcgtcaacaccccattcatttcacaaagatctgaatgtaggagttctagtggtgccaagtttctctcctcggcagccttgtgaggcttgcgaggttgcttcgattgcacacaactatggcacttagaacctttgacaatggaaaacttaggaattaaacacatgctggaaagccgagacatcaagccaaaattaatatgacataaacgtgaatgccaaacattagcctcatcatccacactgccacaaatatggttcacagacttattgcagaaatcagaaagggaaaagcggaacaggcctccgcactcataacctttaccaataaaatatccatgtttagacacgactactttattagactcaaaaaccaacttaaatccgtctctagtcagacgggagccactaacaagattcctgtcgatagaagggacatgctgcacgttcttcagctgcacgatctttcccgaagtaaacttcagatctaccgtgccaacaccatgaacagaagcatgtgacccattccccattaggacggtggaaccccgtgcgacctgataagaagaaaacaatgagatgtcagcacaaacatgtacattggccccagtatcaacccaccaattagtagattgattaactgaaaaaacagtaggtaaattaccatacccgcttccatctccagtgttgccaatggtcacattagcagacttagaagtctgccctgcaggtgccttcatccccttgcgctgtggacacttcctagccagatgaccaacttggccacacacaaagcaagtcctctcatcctgattaggattgttgttgttcttcttctgcttcttgaagttggtggtctgctgagctttgtatttccccttgctcttgttctgggccttgtgcacaacattggcactggactgcccaccatcgcccttagacgcggcatctttttcccgagctttctcctcaacatcaagagacgcaatcaacccctcaacggagtattcctgtctcttgtgtttgagtgcagtaccgaaactcctccaagatggaggtagttttgcaataatgcacccggccacaaatttgtcgggtaagacacacttaaggagttcgagttccttagccatggtttgtatctcatgagcctgttcgactacagaacggttgtcagccattttgtagtcatgaaactgctccatgatatacagatcattgctagcatcagtagcaccgaatttagtattcagtgcatcccacaactccttagcgtcggtcatatgcatatacacctcgaccagacgatcgccaagaacgctaagaatgcatcccacaaagagagtagtggcttcctcgaattgcttctgctgttcagcagtaagaactccttcaggtttgccagtactcacccagaagcatttcatagctgtcagccacaaagtgaccctgatctgccatctcttaaaatgcacaccggtgaatttatccggcctcagtgcatcggcaaaaccagccatagtaaaatcacagtgcctataataaggtttttggattgttgagattatagacatataatgatttaatctattccataaataaatcatgacattacagatgaaaactagcatgaacgcatcattagatctacacatgtaaactacacagtataacatgaacagatcaaatatgcgcaacatattgaacacgtaccgaggtgacgaaaagaccggctgcttggtcgaaacttttcgcaggtgtctacgaaggcacgaaacacgcgagcgaagaggaaggcgagccgtcgcgaacgaacagggagcagtcgcgcgaagcgcttcccaaaaaccttattgccgccttctcccggtgcagaatgtcaaaggcagaggttccggagacctgctctcccgatcgctggtgcacgccggcgagcgggatggagtagtctacgagcgacggcgcagtacagagtaggaggcaaaccctagattgattttgcgtatatactgcgtgaagacggcgggtcggtttatatagagaagggtcgcttgatcagggcgcccgcacgatctctactgcgcgtaaccgaaccggataagtcgcgcgtaacttatccggactccacgccatttgcacgcatcggatttttcggaacgtttccaaaacaaaaacgaatctgaatttgcagcaaaacaaaactgcaaaaggaggctgcatctgcgcaagggtgaggagccaatttttcggaccattcgacgcgtacgtcgtgcacgcgcgccgcctgccctgccctgccaggccaggcaagcgagcgcgcgcgtgtgtttcccctcttctctccaccacacatgcttcaagtggctaggaggacatcctcccttttaaggaggtcccactctcctagaataagcaaggtggtactaaactccacatgcatgccatcccatgaggtgggcttttgtgattttccaaagaattaatcttcgagtgggctaaggcccattcattaattccaacaaaagtttgcagaggaaactgaatctgatcatgccctggagtggtcgttaaacagtcctgcagttggcctcacggtctcttcacttttgagtgcagggtgtgggagaggagaggaaaaaagaatggtcatgtgttgagcaccgtatggatcatgctgtcatgcctcactctgggttatggctgtgtttagttcctgaaaaaagttggaagtttggggaaagttggtagtttggaaaaaaaattgaaagtttatgcgtgtaggaaagtttttaatgtgatgtgatgttgtaacgctccgcttttcgcgaaacgttaaaaactaattcggcaaaatcctaaattgcgaaaattttcgttctttgtgtgcgagtctaagtcgtgccatggatctcaattcaatctccatcgttgttccctctcgtcgccatcaaaatcgcccacctcaagattccaattccgattcaagtctccaaatgaaattccgaaattcaaatcctatcttgaaatcctcgccaaatacatgtccccgttcccaaaaatatcaaaatctcattttgaatctcttccttgacttctcctcgagtctcccttgattcctccctaaaccctcgagttcgaatatcaaattttgaattcaaatccaaaccctaacctcaaccattcaaatcctctagaaaagtctagtttgcctcccaaaggttttgtaggccgattttgttcccccggccccaatttcccccctgcccatctccttcctcctctcgcacgttgctgtgcacgcacgtcagccgagccgagagagagagagagagagccctcgctctcttctctccctccctctctctgcctctctctctctctctttctctgacgccgctcccactcactgagccaccccgccgcctaaaatggaaggggcaaagccccctttccaccgccctatctccctttttccctttccggttcgacctctttctctctcgcccttgtccgcttgtgcttggaggcagagacgctgacctcggtgcgccagctcgccacccccaccttgaccgcgccaacccgcgctaatcctcccgctcccgcaatttgattctcgctgtccgatccaccgcctccaccgcgcccttgcatccacgccgcccacgaaccgcctttgccgctcgcctgccgagctttagcacgctcgctcccgcctcgaaccgacctcgcctccgctataaaacccaagccgagctcctcctcctctctttccctctcgttttcgcctgccgcgccttgtcgccctgctctgctcgcaccgtcgccgttcgtcgccaagcactggtgtcacgccccgagctagtcccgactggaattagcctgtgacgctccaaattaacctgttaatcgataccagtcccaggaaacagtgctggtatcacaggaagatagaatatcacagcaacagaggtctctttattatagagtaggagtacaatcatgttgggctgcggacagatcccgagctcacaactgcattagaaaagggaaacggaagccgggacttggaccaaacaacacaggcgcgacttgggaactaggccgaaaccctaaaactcatcgtaaccggcttgctcctggaagaactcctcatcagcaggatccgcttcatcttcatcagcaactagggggggggggaatatttatatagagcaagggtgagtacgggagtactcagcaagccatgggaaataagtgtttaatgcaggcttcaaggaaaggctgttgttttcgtaattgattttatttgaactcttttctaaaaacatctaggtgagtgcttctcaaacgacacggttgagacagtgcgtcccgtccggtcggagtatgtgcaatgtatcaatctttagatcttaaaacaaggttggcacccggccaacagcttttcaaacggccacccgggccaacaacttttcaaacggccacccgggcctagctgatcccgtcagctgctgatttttcaaacatcgaaccccttttcacaacagtaatttcacaagcagttgtcaaacaaaactacgctaggaatcacctcacatccgcccatgaccgtgggcacggctgttcgaacagtttgttaatctctgcagagggggtacactttacccacacgacattactaacccggatcacccagcccgtggggatcagccacgtcgggagacctccaagctttcatgacaaggcatttccaaagccgacacaggcttaccatatgccgacgagaggggtcccagaccaacaacaggttaggttccagaccatactgtgctaggaagcccagggggggtcctctccgacaccaccccggcgaatccacatgtctctcggcatcatggctcccctgataagctagttactcagccaggggtgtcccattccacccatgtggtcgtacttgtcttttgttcggatgaaattccaaggaatcggtccttaagtgcgggagtgggaaaaccgtacacccggtacgttcaccggtccgcggttttagaaattcatttagttcgcaagcaccgacccaggtgtcgggttttccaagtcttttgtaaaacccaagttttacccaagttgtttttcagattttaagtttgaaggcgaccgtcgatactcgcacagagtgcacgaatatcgaggcgcaactgggtggttacaaggggacatggtataacaattaacaaaggaaggatcaaatgcaacaaattaggcaggtccgccaatctgtcttgcagacgggacaacagattaagtgcgatcctatcaatgcataatattttgcaagcaatataattaaatttcaaatataggctcaagatgttcaaaggtggcttgccttgctcgagatctggagcttgatcctcgaaatcctcgcactgcgggtcttcgggctccgaaactacacgcgaaacgggacaactcaacaaacggcgaaaataaagccttattaatgacctctaagcgtgccattaggtagatctcgagatttggggaattttggaagttgaacggagtcaaacggatttacggtggggaagatattgaatttctaagattattggatttttggtctaaaggaaaaggatttaattaaatcctttttggaaaggataaagagaagaaaaagggagagggagggaatatagacttccctcggacggctagggcgcggcccgagagaaagggcggctcggccgagcttaacgggccggccggcccaagaaggcggcccagagcggcccaagacgcgtgcgcgcggagaaaggagagagagtccggtggaccgggctcaccacgcgcggtcccgggtgggacccgcttgtcagcggctcggctcaccgtgcggagggagcacgcggcgcggcgcttgggtggaggatggacgtggtgcacgcacgcggttcgcggaggacgcaggtgcggcgggcccacgcgcagcctcacggctcgcggtggaacgcgcgcacggggagggactgaccggggtcggcccgtcccgacctcggctgagctggcgccgacgtggcgcctacgtggctgccacgtgggctggcgggaggtagacgacgacccggccgcgaatggacggcgggcggcggcggcgagcggcggagcgaaccacggcgatacgggcgaaagcgagcacaccgggcggttgttcgtgatgaggggagacgagccaacggctcggattcgccggagggagcttgacggcggcgaaacgcggcggcgacaaccggcggggagggaagagggaaacggcgacgaggccacgaggggtcgattcccggcggtgagagcatctacgcggtttcgggaactcgatgctagcgtcggattggatggagctacgccgagcgaggctggcgacgtgcgggtgctacggagctcgagcggcgacggcggcgagcacacggcgagcgacggcaacggttggggcggcgccggctagctacggggagtctactcgtgctaccaccgaaaactaaggggggaagatggagcgaggaggaagaacggagggagacactaccgtgcgggacggggcgctgtgacgagaggccgacggcgcgggagtaatctctccggcctcgggccggggaagaggaagaagagggcgcggccgaagtccccttccgcgtcctcgaacgcaccggttctcctggcgctcggcgaaggacggcggaggcgagacagagcacgggggcggcggcaatggcacggaggcgaatggaagaggaaggggaaaggggaggctggggtttaaatgggcggcaatgtcggtttgggaaccgacttgcgcggtcaagggcgcgagctggcgctcggcggtcgcggccaaagcggcgacagggaggatgacgccggcgaggaggaaaaaggggaaaaggagggggagaaaggggggcttgcccctttgccgattcgggaaaaaggaggaggtgagcgggggcgacgcggcagagggaggagggatgctgcctccgtcccttggcggcttgcgcgcggagtggtggggccggcgatgacgacggcgatgacggcggggcggtttggagcggagcggcgacactggcgacaggcgcgtgcagaggctgacggcggcggcgaccgggcggtcggccaccacggcacgcgcgcgcggcttgcaacgggaggcgcggcggatggagtggcgcggctcgggcacgcgcgctggctcgcggggccaagcggctgcgcggctgcaggcggcagggcagcaggaccgggcggcgcagacgcgacgcgacacgggcggcaaccacgcgggcgcgcgcgcgaacgagtgcggggagcggcagcgagggagcggagagggaagactcggctcggcgcgggcggctcacgcgcacgcgcgcgggcagagcggagaggcgcagggcgcggctctcgcgcttgcgcgtggcgcgcgagagaggggcactcggcgcggcgacgcgcgctcgcgcgtgcggcgcggggcggagcggagggagagagggagagagggagcgggagcgtgccgggggagagagaggaaagggccggggaagaggggaagatgggccgagagaaaatcggcccatcgaccccgggggaggcaaaatggacttttgcagaggaatttgatttggaaggatttggattcggagttgaactcgacgatagatcggggatcgagatcttgagatggcacgggcactagacaacaagcaaagaaacagatttcgcaattagggtttttaggagataattttcccgctaggcgccaagacggaacgggcgctacagaccaacccccctaacaagaatctcgaccccgagattcagcacctaagggagcagctccagaaactcggcgcggagaagatcttctcgctcccaggttgcctcatcttcagaatggttgctccattggactttgtagaacttgatggtcttccttcgagtctgacgttctgcctcttcaagaaccttgatcggtctttccttgtaggtcagattctttttcagcacgatattacccaggggaatttgctcttctggaactcgaagacatttctttagctgggatacgtggaacacgttgtgcacatctgcgagaccttcaggtagctcaagctgataagccacttcgccacgtaggggccgatgtagcggggtgctaacttgccggacatcccaaacctcctcataccacggaggggtgatacccgcaggtacacatgatctcctttttcgaactcaaggtcacgccttcgattgtcagcgtaacttttctgacggttctgcgctgtctttaaacgttctcggattagcttaacttgttcttctgctgacttgagtatgtcaggaccgaataccagcgcttcgcccacctcattccagcacaagggggtgcggcactttcttccgaacattgcctcattcggcgacatctgaatgctggcctgataactgttgttgtatgagaactcagcatacggcaaacaacgatcccaagtgccttcgaaatccagggcacacgcacgtagcatgtcttctaggatttggtttaccctttcagtctgaccatcggtctgcggatggtaggccgtactaaaatttagatcggttccgagggcttcatgcaattgtttccagaaccttgaggtgaactgagtgcctcgatctgacacgatcttcttgggacagccaaatctacatacgacatgggtcatgtagagttctgctagtttctttccatcaaaggtggttttcactggcacgaaatgagctgatttcgtgagtcggtccacgattacccagatggagtcgtacccgttaggggttcttggcaaactggtgatgaaatccattccgatctcttcccatttccactcgggaatcggtaggggttgcagcagaccagctggcctctgatgttccgccttgactctttggcaaatgtcacacagggctacgtattctgcgacatctcgcttcattccagcccaccagaagtatgccttgatatcttggtacatcttcgtacttcctggatgaatggaataggcggactcatgagcttcctttaggatgagatctcttaactccttcttggccggtacacagatgcgtggaccgcaccaaactttgccttggttgtctatggagaaattggtgtctttcttctcctgtattctttttattaattcttttatcccttcgtcgtctttctgagcctcccggatttgcgactctagggtaggctgtactgtcaagctggcagggacacctgactgtaccacggtcagccttaacttctccaattctctgcacaggcgatcttggtcaggccgtatttgagctacattgcaataggccttgcgacttagcgcatcagcgaccacgttggctttaccagggtgatagtggattccaagatcgtaatccttgattagttccaaccatcttctctgtctcatatttaactcggtctgtgtgaagatatacttaagacttttgtgatcggtgtatacttcacatctgttcccgattaaatagtgcctccagatcttaagagcatgaaccacggctgccaactcgagatcatgggtgggataattgacttcatgaggcctgagctgcctggatgcataggccacaacctttcgttcttgcattaggacacatcctaagccttgtcttgatgcatcacagaagatctcgaaatcctttcggatatctggcaaggtgagaactagggcagtggttaaccttttcttcatttcttggaagctgtcttcacaggctgcagaccattgaaatttcttttccttctttaacagctcggtcataggtctggctagcttagagaatccttcaatgaatcttcgataatatccagctaagtcgaggaagctgcgaatctctgacacattcttgggcgggttccaagcaagtacagcttcaaccttgctgggatctacttcgacaccattggaggaaatcacgtgtccaagaaatgctactcggtctaaccagaattcgcatttcgagaattttgcgaatagttgatgatccctgagcttttccattatcaacctcaggtgttcagcatgttcttcctcgttcttggagtatatcaggatgtcatcgatgaataccatgacaaactggtccaggtattccatgaagattttgttcattaagttcatgaagaatgctggagcattggtgagtccgaaggacattactgtgaactcgtataaaccataacgcgttgagaaagcggtctttgggatatcttcagatctgattttcagttggtggtaacctgacctcaagtcaatttttgagaaaactcttgctcctttaagttgatcgaataaatcgtcgatccgtggcaacgggtacttgttctttatagttacttcattcagggctctatagtcgattaccattctctcagagccatcctttttcttaaccagaagcactggggctccccaaggggatgagctaggtcgcacataacctttactttccagctcttcgatttgtcttttaacttcggctaactcattagctgccattcggtagggtctttttgcaattggtgcggtgcctggtgccagttctatggcgaactcaatctctcggtctagtggcattcttgttaattcttccggaaatacgtcgggatattcacaaactatgggcaccgactccaaggaggtgacttgtaaacaggttaagatagaccgacttgcggtaggagtgttaggggtaaagcggacttgctttcctccaggtccttgcaaggtgatggacttttcggcacaatctatctgtcctttgtgcttagccaaccaatccatccctaggatgatgtccaagctttgcgagtctaggactatcggtttggctaggaagtcaacttcctcaattctaaggttaacttccgggcatatttgagttgcccttatattccttccaggggaatgtactatcattggtacacgtaaattttgggttttccaaccatttcttttcacaaaagcttgtgatatgaaagaatgggaagctctcgaatcaaacagaactattgcgggtatggagttgacagagaacatacccatcacaacgtctggagcatcctgagcggtttcagcttgaatgtgattcacacggcctcgaccaaagtggttggaagcatgtgaaccttgtccacttgcctgagtgctaggacgagactgagctgccgctggagtaggagttctggcagtgctgccattagcatgccctgagttggtgttggtagaattctgagggcactagcatagtgacccatctggttgcaccggaaacactgaactgctgatggtccctgtggtgacttgaaagaggtaacactgtttggcgcagtattgccactaggggcacgctgctgtggctggggtgccgggcggttcatctgaggacgaggggcgtagcctggctggcggttagcctgagtgaccgactggtggtattgcatgggttgaccgtagcgagggcgaggtgcgcctcgggaggaattcccctggtggttagatttgcgtttcttgtattcttcggtagcctcttttctggcatcctcaagtagaagtgccttgttgatcatatgttgaaaagtggggaagtcatgcgctagcaactggagtctcattccaactgcgattcctttcaagaatttcctgatcttcttcttatctgagtccacttcctcaggggcgtaccgagccaacttgttgaacatacttaggtactcattgacactgctgttgccttgcttaagtctgttgaattcctctttcttcatgtcaatggtgctttcaggcacatgagctgcacggaaagccgtagcaaactcatcccaagcaatgttagtgggttcagggtgtgcattgcagtaattctcccaccaatctgcagcaggtcctcttagctggtgagaggcgtagagcgtcttctcgaccggagtacactgcactaagttgagttttctatcaacatctttcaaccaatcgtcagcctcgacgggctcgacggtctgagagaactctggcggacgtgacctcagaaaatctgtcagcttggatctattgttgcccatgtgagggtggccatttccatgcgcattatgctgataaccggctacggctgcggctattccttgcaagatttgtgtctgaactgccattaagtgttgcatgttgttttccacatgagatggggaagggaggcgttcttctccagaattatgactggcagtgcggtgagagcggtgagactgttccatttctgcatcacgggaagctgtgcgatgcgagcggttgctacggcggggttgctcaacttctgcattgccggaaacagtacggtgcgaacggttgctgcggtgagactgctcattagctgattcatgatttgcttctggttcgactctaccttcttcaaaaccgaagcgggctggcgcacgagctgcacggcgggggcggctagccatctaaactcccagaagagggcggggtaagagtcagataagtacttaggagggcaaggagcaaagtaaatagcaactcagatagcacacactaggcataaactagatttttcaaatcttaaaaacacctgatacaacgggtgtggacaagtcacagagctacgccgagcttgactgtgcgcacaccacctaggagaaccagactaccaaacaacacccacaatcaaacacacgcacgcactacctcgccacgactccaaaagagttggcggcggaacaaaagggcctaacacacggacgactgctgaagactgcctcctctactcctcgtcggcctggctgcctcctgtagtcggctcctcagtcgaagaaacgtcgatcggctgacgtgaagggaccggcggaacctgtcgagggccggcagcagcgcgggccgctggcggtgggggagctgggtggtggaaacggaacacggtggaagaaccaacaacacgcttccacgcagtgcggataaagcgtggaccacggcgggaggaaacaactggggtgtgtccgggggtgtaggaagggctaactgggtgtgggtagggggagtacactggtgagtacggcgcacgcgagctgggggagcgcgggccactgggagtgcgggcagagccgcgggagctgtgggaggacaggtggctggcgtggcagaggcggcctgagtcccaggagatagtgtcaactgaggtgacaccctcctcggccagacgggcctccaaagcggcgtagcggcgggccagggagcggtaagcctcaaggagtaggtcgtgctgagtggcctgagcctccgaaagctcaaccatgcgagtcagcactggctgagactcgctgtacggacaagggtacctggcgtctgagtggccagaaggaaggcgtggaagctgccggaaggcggagcctccgagacggtggctgtagtcgtgggctaggcgacgaagcgcagtccaggaaaggtcctggtacgcgatctggagagtgggcctggccacggtgaagtggtgggggtgaaggccagctccgtgtatacctccacgagggtagaggtacacggagagctcacagtgagggggaacacggtccacggagtaccccgtgtactcgggacacgagaagccaaggaaacgggtgaggtcacgaagctgagcgacgtggtgaccctcaccaaaaccgtgggaactgaagctggcgttcactgccatctacaattttgaaagagggagaaggatcagtaaccattttagaaacaaactattgaaaataaagaaaacaaaagagaccttagcttttcgcaagtagttttgaacttagtatccttagggtcgtcctaagcgtcgggtttcgccctagggccaagcctgtgctctgataccatctcttgtcacgccccgagctagtcccgactggaattagcccgtgacgctccaaattaacctgttaatcgataccagtcccaggaaacagtgctggtatcacaggaagatagaatatcacagcaacagaggtctctttattatagagtaggagtacagtcatgttgggctgcggacagatcccgagctcacaactgcattagaaaagggaaacggaagccgggacttggaccaaacaacacaggcgcgacttgggaactaggccgaaaccctaaaactcatcgtaaccggcttgctcctggaagaactcctcatcagcaggatccgcttcatcttcatcagcaactagggggggaatatttatatagagcaagggtgagtacgggagtactcagcaagccatgggaaataagtgtttaatgcaggcttcaaggaaaggctgttgttttcgtaattgattttatttgaactcttttctaaaaacatctaggtgagtgcttctcaaacgacacggttgagacagtgcgtcccgtccggtcggagtatgtgcaatgtatcaatctttagatcttaaaacaaggttggcacccggccaacagcttttcaaacggccacccgggccaacaacttttcaaacggccacccgggcctagctgatcccgtcagctgctgatttttcaaacatcgaaccccttttcacaacagtaatttcacaagcagttgtcaaacaaaactacgctaggaatcacctcacatccgcccatgaccgtgggcacggctgttcgaacagtttgttaatctctgcagagggggtacactttacccacacgacattactaacccggatcacccagcccgtggggatcagccacgtcgggagacctccaagctttcatgacaaggcatttccaaagccgacacaggcttaccatatgccgacgagaggggtcccagaccaacaacaggttaggtcccagaccatactgtgccaggaagcccaggggggggtcctctccaacaccaccccggcgaatccacatgtctctcggcatcatggctcccctgataagctagttactcagccaggggtgtcccattccacccatgtggtcgtacttgtcttatgttcggatgaaattccaaggaatcggtccttaagtgcgggagcgggaaaaccgtacacccggtacgttccccggtccgcggttttataaattcatttagttcgcaagcaccgacccaggtgtcgggttttccaagtcttttgtaaaacccaagttttacccaagttgtttttcagattttaagtttgaaggcgaccgtcgatactcgcacagagtgcacgaatatcgaggcgcaactgggtggttacaaggggacatggtataacaattaacaaaggaaggatcaaatgcaacaaattaggcaggtccgccaatctgccttgcagacgggacaacagattaagtgcgatcctatcaatgcataatattttgcaagcaatataattaaatttcaaatataggctcaagatgttcaaaggtggcttgccttgctcgagatctggagcttaatcctcgaaatcctcgcactgcgggtctacgggctccgaaactacacgcgaaacgggacaactcaacaaacggcgaaaataaagccttattaatgacctctaagcgtgccattaggtagaactcgagatttggggaattttggaagttgaacggagtcaaacggatttacggtggggaagatattgaatttctaagattattggatttttagtctaaaggaaaaggatttaattaaatcctttttggaaaggatacagagaagaaaaagggagagggagggaatatagacttccctcggacggctagggcgcggcccgagagaaagggcggctcggccgagcttaacgggccgaccggcccaagaaggcggcccagagcggcccaagacgcgtgcgcgcggaggaaggagagagagtccggtggaccgagctcaccacgcgcggtcccgggtaggacccgcttgtcagcggctcggctcaccttgcggagggagcacgcggcgcggcgctagggtggaggatggacgtggtgcatgcacgcggttcgcggaggacgcaggtgcggcgggcccacgcgcagcctcacggctcgcggtggaacgcgcacacggggagggactgaccggggtcggcccgtcccgacctcggctgagctggcgccgacgtggcgcctacgtggctgccacgtgggctggcgggaggtagacgacgacccggccgcgaatggacggcgggcggcggcggcgagcggcggagcgaaccacggcaatacgggcgaaagcgagcacaccgggcggttgttcgtgatgaggggagacgagccaacggctcggattcgccggagggagcttgacggcggcgaaacgcggcggcgacaacgggcggggagggaagagggaaacggcgacgaggccacgaggggtcgattcccggcggtgagagcatctacgcggtttcgggaactcgatgctagcgtcggattggatggaactacgccgagcgaggctggcgacgtgtgggtgctacggagctcgagcggcgacggcggcgagcacacggcgagcgacggcaacggttggggcggcgccggctagctacggggagtctactcgtgctaccaccgaaaactaaggggggaagatggagcgaggaggaagaacggagggagacactaccgtgcgggacggggcgctgtgacgagaggccgacggcgcgggagtaatctctccggcctcgggccggggaagaggaagaagagggcgcggccgaagtccccttccgcgtcctcgaacgcaccggttctcctggcgctcggcgaaggacggcggaggcgagacagagcacgggggcggcggcaatggcacggaggcgaatggaagaggaaggggaaaggggaggctggggtttaaatgggcggcaatgtcggtttgggaaccgacttgcgcggtcaagggcgcgagctggcgctcggcggtcgcggccaaagcggcgacagggaggatgacgccggcgaggaggaaaaaggggaaaaggagggggagaaaggggggcttgcccctttgccgattcgggaaaaaggaggaggtgagcgggggcgacgcggcagagggaggagggatgctgcctccgtcccttggcggcttgcgcgcggagtggcggggccggcgatgacgacggcgatgacggcggggcggtttggagcggagcggcgacactggcgacaggcgcgtgcagaggctgacggcggcggcgaccgggcggtcggccaccacggcacgcgcgcgcggcttgcaacgggaggcgcggtggatggagtggcgcggctcgggcacgcgcgctggctcgcggggccaagcggctgcgcggctgcaggcggcagggcagcgggaccgggcggcgcagacgcgacgcgacacgggcggcaaccacgcgagcgcgcgcgcgaacgagcgcggggagcggcagcgagggagcggagagggaagactcggctcgacgcgggcggctcacgcgcacgcgcgcgggcagagcggagaggcgcagggcgcggctctcgcgctttcgcgcgccaagcgcgagagaggggcactcggcgcggcgacgcgcgctcgcgcgcgcggcgcggggcggagcggagggagagagggagagagggagcgggagcgcgccgggggagagagaggaaagggccagggaagaggggaagatgggccgagagaaaatcggcccatcgaccccgggggaggcaaaatggacttttgcagaggaatttgatttggaaggatttggattcggagttgaactcgacgatagatcggggatcgagatcttgagatggcacgggcactagacaacaagcaaagaaacagatttcgcaattagggtttttaggagataattttcccgctaggcgccacgacggaacgggcgctacaactggggaggccggtgcgtgcgtggacgtgtgacgaggagctccgggcacctcttcttccccttccctggccgctcccagagagcttgctcccgcgccgccgccgctcgtcacggcgccctgtcccgatgcggtagccctccgttcctcttcctcgctcgccctccccctcctttaactcgcttggtagctcggttagccttccggtggttcgtaggcgccgccccaagcccggccgccgctcgccatggccttgccgccgtcggcgcctgctcccggaggccgcctctcgtcgccggacctccacggcgcctccccaccccatccgactccagaaatgaaacccttgagccacggagatgctctcgccaccttgaatcgacctctcgtcgccctgccgtgatttccccttttgctcgccgccgacaatcgccgtcgaaatccgccgccgtcggctcccctctcgtcaatccctctcgccaccacgctcccggggatccccttgacctcccccttgctgccccatggccgccggcctcccttctcgctctcgcgccgtgtcgccccttccgccgccgcatagcgccgcggcgcgtgcgtcgccggtgaccttcgggtcccgcgtcaccgcgtgcgcgtcgcaacccctttccgcaatagctgagcccgagcccgtgcttccttcgctcttttcgcgcgcggccacgtcggcgtgccggcgagattggccgccgccgccagctgccgtcgttcttcccccggctaatccgttccgttgaatcgattccccttggcctcctctctcttccggtgctaaccccccgattcatctcgccgccgttcgccggtttgcgtcactcgccaccggccgtcggatcagcccgcctggcctcctctgcctccccatctgacgtggcatccacgtggatgccacctcagcctcgggcccgcttgaccgagtcaggcaacccagtcagcctccctctccgtccctttccccgtgctcgcggaccacgtgagccatgaggctgcacgtgggcccgacgcatcccggtccacccagcgcacgcgcccgaactgtgtccaccaagccctagcaccgcccctcccgtgagcccttccttcggtgaacccggtcactaacaaggtgcacctggtgcaccggaccgcgccccctctcttccgcgcgccctaatgggccgccttccccgcgcccgcgccggcccaaatggctcggccgagcctccttcaaccctcgggccgcgcccttgccgcccgagaaaatctaatatacatcaatcatccatttccttttccataaatcaattctttattattccaaaattccataaatcaattcctttggtcccgcacgtcagtgattgtcaataatattcttgagaatattatttctataaattccataaaccattcctcgtattccaaaaaattccgataaatcatttcctagtccggaaaatcccatttgagcttccaaaattcatatatctcgatccgtaacttcgatcgactccgttcagcttccagtatttccgtaaagttgagatctttttaatggcactattaattagtctaattaggatctttcttttggtcttttgtctagattttcgattgtttgcgtatagttgcggttaccggattttcgtcactcgtggttttctcgaagattcgtgaagctccatgaagaccttgagcaaggcaagtcaccctttgaccaattgctcctataattggaaaatcattattattttgtttgcaacttgaattattagaatcacacacttaacttgcttggccttggtttgcgtgccaaaccgacggacctacccagtagtcacactaattcttgtaggttgtactaccctgattccttgtcgctccacccttatgatacttcggtatccgtgctctctgagcgcgtataccaattatcccacatacaccgttgtttgttgaaaacttggaaaatgggtttgtgaagccttgaaaacccgacatgtggtgtcggtgtgtttgaaaataaaatgaattgtgaaaactcgcgatgcgggagccgtgcctacgtggcgttgtcccgtattcgcatataaggaccgattcctatgggaaactcatcaagcataacaaagtgcaaccacaaggtggaatgggacaccctggctaagtaactagtcggttcagggaaacctcgcatgccaatagttgggaacgccggggcggggtcggacaaaccgggttcctggtaaggcaaggacgagaagcttgctcacttaccgatcaaggtagttggagttgatttgtgaatggctaaaatggcctatatttaagtgaggatttgatctttctatgtggcatgaggtaaccctgggtcggcttgggaaaggctttgtcgcgaacctctgacaccggccagtgtctggagtaagttcgtgtcttgtgggtaaagtgtacccctctacagaggttaactaactgtttgaacagccgtgcccacggtcatgggcggatgtgaggtggttcccgttgcgtagatttgtttgccagtgctttgtgaaaagttgttgtggtgtgggaatcgtaaccagaatcagcctatgtggcagatggatgacctaagtggtcagaaacgaatctgtgtgattcgggatgtctgcgggcatcatagactaggctttccgagtagaagcggattgttgtgctgctgggcagctggactctgggagtccgagaaaatgaaaaaggctctgggagccgcctaatcaagtgaaatggctctgggagccgataagtaatgatctgacccgggaggtcggtacattaccatttgagttgttgaaaagcatctcttaagtcgaatcgagacacaagtctccttttgacccaaagttaaaaagaaagaaatcacttagtgatttcaaacaaaggatttgcaaaacaaccttgcctctcttccaagcttgcattaaacatctaaattcccgtgacttgctgagtacgaaaaagtactcacccttgctctctctctctctctttatatatatatatatatatatatatatatatatatatatatatatatatatatatatagttcccccgtcgtgaagtgaagatgaagtgaagtgaagattagggttttgtcctggttcccagccgtcgcctgtggtgttgggtgttagttcgttggttctgctactgctgctgttgttagtgtttcctcgtccgtgtcatcggttgcattctcgggctgtctgagctgcaacctaagttaaggtaaataagtcctctatttattttaaagatttgcaatgattcatatttgtcaccgtgggtaccagcactatgtcctgggactggtactgagatcgcggtttcgtaggaagcggttcgcgccgttattcctacgacacgctcctgtcaggtgccgttgtacggcggtgccggattggggtgtgacagatgttatgtgatggaaagttggaagttgagagtagttgggggtgaactaaacacggcctatgtgatgtggaagactacaactgccccagctcacaacatgcagcagctaattataagctctctctcttaagtaaaagtccaagtgtttgattctcggtcacactttaccacagtttattatgtctaagattagataagtttgattacgttagcagctatttgattgtgtccacagttgtaataagattctcttataataaattaggtctcacatatcattgactcgaaaaaatgtagtaagattctccaaggtttactaagagcaagtttaataatataaccaactactcatttcaaaaattgaaacatcatttataaccaatctagtagtctacttatacattgtatctaatccactcacatattggagcacgtgctgcaattaactactccctctgtcccaatatattacaacttagatggatctgactacgaatctggacatatggtatgtctggtatgtccagattcggtatatctggtatgtccagattcgtagtcctaggatgggtaggttgtaatatattgggatggagggagtacaaatatgtagtctgctttttttctctctcctccacataaatagaaatatgacgtggcaagatgtacggactgtttacgtcaccctattataggtgtgatcaagaatttaagacatatcaacttaaacaaatactccctccatttcgaaatgtttgacaccgttaactttttagcacatgtttgaccgttcgtcttattcaaaaattttttatgaaatatgtaaaattatatgcctacataaaaatatatttaacaatgaatcaaatgataggaaaagaattaataattacttaaattttttaaataagacgagcggtcaaacatatgctaaaaagtcaacggcgtcaaacatttcgaaacggagggagtactataatactagtacatgaacagaggtcgcaatgccacgattgggttttcatctggaagaaccgggctccaccgaaagtgtaattcttcgcctgggtgctctcaaaagaacgactaccgactagcaaaatctgttgaagaaaaaggttgtccaatcggcaacatgcgacctctgcaatggagcgactgaaactgccttccatttctgcatacaatgctccttcgcggttgcattctggaactccttggaaatccacctgcacatcacctctatgcaggagcttcacaacctggacaggcccagccggatcccgaccaaacactacgaactcttctaccttctttgtttctgggggctgtggaatcatcggcatgacatcgtcttcaggaatcagaacccctccaccgctcggcttatatcaaaatgcctagaagatgtgaacctctgggtggaaaggctagaatcctggaaagaaattctttcctccttgctgcactccaatgtaacgaattaatcatatgtactgtttctctcttttaaagaaattcagattgggaagctttcccgcgtgaccggtctaaaaaaatatttattgataaatgatgataaaatataatcgagaaccaaacgcacctgcaatgcgatcaggtgttttagcttcagctcgcacaagcacatgcaagaaagccggatttcctactaaccggcacctttttgagggctccatctctcaaggccattaaagtgcctatgggctcaccggccaataacaaactgctgttatccatccaatccagtgtcccaaagcaacattcaagctagcccaacaaccaggcctccaagagtagcaagttgagcgtgcaatccccggcattctcgactataaatacccgaccagaaacacacccagcttcatcactccatctcgccttgtctcattccaagtatagctgcagcctgcacgtactgtactgaggacaatggcgagcaaacgcttcttgtccctgtccctgctcatcctcctcctcggcttctcctccagcttggcagccgggcaagtcctgtttcaggtaagaggtcgccatgagttgggttgcaggctgcagtgaactgatcgtgttttgttctgagcctgagagaatggtgctcttgtgtttgatgatgatgcagggcttcaactgggagtcgtggaaggagaatggcgggtggtacaacatgctgatgggcaaggtggacgacatcgccgccgccggcatcacccacgtctggctccctccgccgtctcaatctgtcgccgaacaaggtccggtgctctctcgagcaccttcgtcgtcgtcgtcgatccatattgccggcaaaatatatccaattggcttgattgctgatctgcaggctacatgccggggcggctgtacgatctggacgcttccaagtacggcaacgaggcgcagctcaagtcgctgatcgaggcgttccacggcaagggcgtccaggtgatcgccgacatcgtcatcaaccaccgcacggcggagcacaaggacggccgcggcatctactgcctcttcgagggcgggacgcccgactcccgcctcgactggggcccgcacatgatctgccgcggcgacccctacggcgacggcaccggcaacccggacaccggcgccgacttcggcgccgcgcctgacatcgaccacctcaacaagcgcgtccagcgcgagctcatcggctggctcgactggctcaagatggacatcggcttcgacgcgtggcgcctcgacttcgccaagggctactccgccgacgtggcaaagatctacatcgacgccaccgagccgagcttcgccgtggccgagatatggacgtcgctggcgtacggcggggacggcaagccggactatgaccagaacgcgcaccggcaggagctggtcaactgggtcgaccgcgtcggcggcgccaacagcaacgccacgacgttcgacttcaccaccaagggcatcctcaacgtcgccgtggagggcgagctatggcgcctccgcggcgaggacggcaaggcgcccggcatgatcgggtggtggccggctaaggcgacgaccttcatcgacaaccatgacaccggctcgacgcagcacatgtggccgttcccctccgacaaggtcatgcagggctacgcctacatcctcacccaccccggcaacccatgcatcgtgagtagctaactcgatctctagcaaatattctgaatcatcctgcaaattgatcgatgaactgatgataaattctgcaaaattctttcagttctacgaccatttcttcgactggggccacaaggaggagatcgagcgcctggtatcgatcagaaaccggcaggggatccacccggcgagcgagctgcgtatcatggaggctgacagcgatctctacctcgccgagatcgacggaaaggtcatcacgaaggtcggaccaagatacgacgtcgagcacctcatccccgaaggcttccaggtcgtcgcgcacggtgacggctacgcagtctgggagaaaatctgagcggtggagaggcacaattagcagattttatttacctgcaattttttccaccctcgacgtataacatatacatgtgatggcaacgagttgtatgctgtatctgatctgaactatgtacgcgattgtccacaaagtactacctccgtaaataaagtgaggatatggaacatgcgtttgcatgcatggttttacaaataatggtatgcaataaaattttcactgcttatgcatttttgcttggtttgttttactaataatggaatattttattttactcatgttttgtatggcaacgttgttttagcacactactacaaaaatcatctttcgtggcggccattttggattttcgctggcggaaatcgcagccgccacaaactaaaggccagtgaagatcacgatcttcactagcggttttcgaccgccagcgataattcatttttgctggtggtcgtcttaagccaaccgccagcaaagatccattttcgccggcggctggcttaagacgaccgccagcgaaaatgaattatcgctggcgggttacagtgtgccagccgccagtgttaatcctggccaaatttttttaaaaaaaacgacggagcagagcaaccgctccgtccgtcctccgtcaacgctccaccattcaaaaatttcataaaaatttatcaagcattcaaaaatccacaaaaaaatacatgaacaatttacaatcaacaatttccattcactcaagcattcaaacatcacaaaaatcaacagattaacaaaaatttgaagtccgccaccgagccccgtcggcctccaccgcctccgcctcaacgacgccgttagtgagccctgccggcctccaccgctgtagagcagcgccgcaacctccaccgcggcccgcgcgcagatctgagagagggagagggggtggtggcggcgggggaatgggagaagggaggaagacctggatccaccgcctcgattcgccaccgtgccgccgccgcgagccgcctgcccaccgccgcctcgacctgcgtgcccgcgcgccgccgcctgctggatggagtcgcctcgggcctcctcgcctccgctgctgagctccgccgcagctgagccccgccgctccccgcgcgcactaccaccaggtccgccatgtgcgccgacgccttctggatggagttgcctcggacctcctcgccaccgctgccgaggtctgccgcagtcgagccccgcccctcccggcactggatccgccgcgtgcgccgcgtgcacccggccaccgctctctctacagcgaccctctctgcagcgaagggataaggaagaatgagtggtgaggagtgaagggataaggatagggtggggagagattttttttatagctcgagtaatttttttgctggggctatgtggtgaaaccttttcagaagcggttgtatgagtggactgcttgtaaaaaagaccaacgccggtgaatatctgccatttttgctggcggtgtattaagtgcgccgccagcaaaaactgtaatatctttgatggtggcccgcttaaatcaaccgccagcgaagatcagttttcgctggcggttcgaaacttcctaccccttgttatattttttgtggcggttttcataaatattcgccatgaaaaatgatagggtgacgctgtgaaaaattaattttgtagtagtggcaatgctagattgtcagctcacatttcccaattaatagtcacagaatttagaaaatgaattagaaggtagaaacttcaatagttacagaattcagaaaattagaagataggaactaggaaaactagtcttttttttcttccaagggttcaaaccaatgaacaactcataaactgcttatcaaaatctccagctcaccaaacataacccataccaatggaggtattagacaatcctcgagaaagtacctctatgcatctaaagtttataataaaatttttggtatcttaatatacttagcacctagaattaccaaattttatactagaaaatatggtaccttcagatattttcgattcttaaggatagtaatattacacataccaatatgatagtgcaagcaaaggctaaaaaaaactatataaatgatttatttaaaattacataaaaaaatcaaaagattaagaaatgagtaaatttcaaaaagccacaggtattattgttcgagttgcacaaaatcaccggagtttcggcatgtgttaagtaatcatcgatattgtggttctaaggttttacaaaaccacaatgtttaccaatctagtttagtactgctgcaatatgaaaaataatgaacttaaagtactacaatattcaaatgatgaattaaaaagaactcatatattcgatcattgtttggaactcatatgtatggtagacaaagaaaattttgtttacggtgtgaaactataaggtcataatacacatagttatgtgaaaaagaccaaaaccctgtagttttatgcaatttactctagatcataatacctatggttttgtgaaatttactcttcttatagtatatatgagagcttgtaacaaatacatgtctataaacaatctcaaatgagaaaacttttaattacaaagttgaagttctcatcgaggattgtaacattcacacgaaatttgcattcatctgacttcatatgtaaaagtttgaaaaaaaattaaatctgaggtttttccatttttagaggttgatagctagaaaaaaaaccgcatgcacactaatcgatgccatttttaagaagtctacttgtgaaaaactattttccttattctttgaaaatgactaaaatttaaaaatatttaaaaatttatagaaaatatcatattatgtgtgcagatacttcaaactataaaagacgtgcgatctagcaagtacaatatctccacacatgatatataggtttaatagtgttcttgtccctgttttcaactgcaaatgtaatcacacccctattttttttaactttgtgattatacccttatttttttaactgaagcttgtgtttgccccaatcccatcaagtcctattaaatacatgtatgccatttgcatatttgcctctacttttttttagaacttttagattgtgcctatattttgacatgattttcaaattttcaatactaaaacataaggtcaaactaaaacttgacatgaagtttgaccctttttctacatgcatttaataccgttaagagggcttaatggaatgggggcatacacaaacttcagttcaaaaagtaagggtaaaatcaagggataaaatcatacttgaagtcgaaaatatgggtaagaacacaatagcccaaaatatacatacatggttggaaaaaccggcaaatcttctcaatcttttgaattttttatgaattataaaaataaatcataaatcatttttaactattccttttgaagcttttggctacgcatcaaattttcgtagaagaacaatactgccactcgagaagtaaaaagaacagtaacaataattcaccagtacaatcgaaccaagcaaaaatgcataagcattaagcagtgcaaattttattgcatagcattattcgtaaaaccatacaaatgtatgtccctgatcctcactttatttacggaggaagtacttcgtggacaattgcatccgtaattcggatcggatacagctcgttgccggcacgtatatacgtataccggtcagggtaaaaatcgcaggttaaatctgctaaactgagagtctcgtcatcgtgcgctcagattttctcccagattgcgtagccatcaccgtgcgcgacgacctggaagccttcggggatgaggtgttcgacgtcgtatcttggtccaatctttgtgatcaccttgccatcgatctccgcgaggtagagatcgctgtcagcttccatgatgcgcagctcgctcgccgggtggatcccctgccggtttctgattgacaccaggcgctcgatctcctccttgagaccccaatcgaagaaatggtcgtagaactgaacaattttacagaatttatcatcagttcatcgatcagtttgcaggatgattcagaatttctgatcgagttggctactcacgatgcatgggttgccggggtgggtgaggatgtatgcgtagccctgcatgaccttgtcggaggggaacggccacaggtgctgcgtcgagccggtgtcgtggttgtcgacgaaggtcgtcgccttggccggccaccacccgatcatgccgggcgccttgccgtcctcgccgcggaggcgccacagctcgccctccacggcgacgttgaggatgcccttggtggtgaagtcgaacgccgtggcgttgctgttggcgccgccgacacgatcgacccagttgaccagctcctgccggtgcgcgttctggtcgtagttcggcttgccgtccccgccgttcgccatggacgtccatatctcggccacggcgaagctcggctcggtggcgtcgatgtagatctttgccatgtcggcggagtagcccttggcgaagtcgaggcgccacgcgtcgaagccgatgtccatcttgagccagtcgagccagccaatgagctcccgctggacgcgcttgttgaggtggtcgatgtccggcgcggcggcgaagtcggcgccggtgtccgggttgccggtgccatcgccgtaggggtcgtcgcggcagatcatgtgcgggccccagtcgaggcgggagtcgggcgtcccgccctcgaagaggcagtagatgccgcggccgtccttgtgctccgccgtgcggtggttgatgacgatgtcggcgatcacctggacgcccttgccatggaacgcctcgatcagcgacttgagctgcgcctcgttgccgtacttagacgcgtccagatcgtacagccgcccaggcatgtagcctgcagaagcattcaagcaattcaacgacctgtgcatgtattttgccggcaatggtgcgacgacggaggggatcgagagagcagagcaccgcaccttgctcgccgacagagtgagacggcggagggagccagacgtgggtgatgccggctgcggcgatgtcgtccaccttgcccatcaggaagttgtaccacccgccattctccttccacgactcccagttgaatccctgcatcatcatcaaacacaagagcatcactgcatcattctcttaggctcagtacaaaacccgatcagttcactgaagcctgaaacccaactcatggcgatctcttacctgaaacaggacttgcccggctgtcaagttggaggagaggccaaggaggacgatgaggaccgaaagggacaagaagtgtttgttcaccatggtgttcagcacctgcatgctgcagacacacttcggagatggatgattgatgaagctcctgggtgtgtctggtcaggtatttatagtcgagaattgccggggattttgccatgctcaacttgcaacttttggaggcctggctgggcttgaatgttgctttgggacactggattggatggataacagccggagtttgttattggctggtgagcccataggcaatttaatggccttgagactttgagagttggagcactcaaaaggcgcaggtcagtaggaattccatctgtcttgcttgtgcttgtgcgagctgaacatgaatacctgatcgcacacagagcatttgagagcagaggaaaagaatcgattgagaatgtacgcaaaacgagctgagccattaacgtataattaattgagtattaactattttaaattttaaaaatagattaatataatttttaagtaactttcctatagaaaatttttgcaaaaaatcataccgtttagtagttcaggaattgaacggtgcgcgtgtaaaacgagagaaatcttctctcttacacttgctgctgaattggtacatgttgcgagttgtggcgaatatgtattttttttcacctaggtgcaaccgcacccatcatttacatacaacttaaatgtacataaaaaaatgtagggcttgtttggtttaatacttaccaaaatgttggtagtgacaaaacctaggcaagttttggcactacaaattttttggtagagtagagttgtatttggttggaggccaatttagaaccaagcttttagcataatatagaaaatatcaaattggacattggcaatgccaatgatttggcttcaaaccaaacccgtcttatgcactgttcaaactatcaaaatatttgtagagcacgttttggcactaaatccaaaacggcccataattgtactatttttgagaaggtacctaaaggtgccacaattttctagtaaaatttggtacctctaggtactttatacctcaaggtaccaacaattttagtgtaaaatttagatacttcaaggtattttctcaagaactataaaattcctctataaaaaaatagtttgaaaataattggtagcatcaatcacaatggcataagtctatacacaaacatacacaaccatgcaaggctgaaacagatatataatcagataaataaaaaataaaaaaacaatattgtgaacagtacatctccagcacaaatagaatatgttatttctgtttctttactgtaaattaaattttgatgtgcatgtttgcatagtggtttatatcttctttatctatcttaacattttttttatgaaatatttacatactccctccgtcctaaaatataagaagttttagggttgaacacagttattaagaaagtagatagaagtgagtgttggagggttgtgattagatgagtagtggaggtagggggaaaaaattaatgatgaagggttgtgattggttgggaagataatgttgatggagaatttgttatattttaggacaaatactgagagttaaaaattattatattttaagataaagggagtagctatgtaggtgacatgtatacacctagatacgattgcacctagctataaaaaatactttcccgtggcagttccacaggaccagggcatcaggttcctgttgccatgcacattttagcacgatttcagcaaatttcatgcagcacgttggctgtagcacattcattcctgaacacaggatatggtgcgtctgtcgaggcagataacagaatattcaagatgagaaaattttgtggatggaaccacttggctccaagtctatggtgtgaaccgccctgaacattccggttcaaacaaaacaacggtagcgtcccgagaactgacaccgcgaacagctagccatagtttcatcccagattttaattgggctgtttgttattccaagggaaaaagatagagcaataaaggatcggtcggcttatttccgtgcggctgcaagcctcctcgtcctttttggagtcaaaggcttgtataagcagaggctcatcaggatggttggcttgataagtctggcgtacacaggttgtttctggcaagagcccaagagcagatcggaaccgacttaacagaacagcttttctgcaagaagaacgaactgatgaaaagatcaagggaaagaggggaggcgccaatgcgccatgccttggacgtcacactgcacgcaccggcaaaaaaaaaaaaaagatttagttgtgtttgcgaaattaacagatagtggatcgaacagcgtttgatgttcaaaaaacagtgccgatggagacgcggggaatcgaaccccgtgcctctcgcatgcgaagcgagcgctctaccatatgagctacgtccccaacgatggtaatgtgtaacaaccagtgtatgatactttaatccatgcaatttgttgtttagaaagtgggatcgcggtagaagaatttggacagtcagatattttccgtatcttaaaacgccaacagcatctctaaggcaccacaattgacaagaacatctctgaactaattttttagactaagggtcccctttgaatcgcatgaatgagaaagtataggaataggaaaaacgcaggattttaataggaatgtaagtgtaaacagaggattgcaaaacacaggaatggtcgtttgattggaccgcagaaaaaacgcaggaattagaggagagataaagactcagaggaaagtttccaagaggttttaccccatgttagaattcctccaaaacttgcatggcattagacaatccataggaatttcataggattccataagatttattcctttgattcaaacggctatataggaaaaattcctataggaatgaaaacctctaaaatttatatgaatttccttcgaatcaaaaggggcctaaaattactactccaactacgccaactgcctctgtgtattgtcgaactccactcaaccctacagtttggatggcttggggaagatgtccggcgtgaacttctgcgccgcgcttatactccccttgatcttcaatttacccctgcaacaacgcacgaacacgatatcatcacgacaactcataattccttttttcctaagcaatctctgaatcaaatcaagattgaatcaaacagttctttccaatctcacattatgaacgccatctgagggttcagcttgccgctggagatggccaggaaatcgtcgtccgtgaaggagaaggtcgcgtctggcttcccttcgtacggccctgacagaaaaaggcagagcttattcagtacgacgacgcgacagacaaagacaagagtcgacggagatcgatcgccgggaaagctctacctttggagacgacgcccttcttgagatcgacgacgaatacctcctcgtcgaaagcgagcttctgagagaaaatccacaagtgcaacgccgcacgtacttagttaatctcacggaaattcatggtgttctagtcgattgaccgagatggttatattaccttgggagagatgttgagctggtaaacgaagccgatcttttcgacgagctccttgccggcgccggaggcgaggtggacgcgcaactgctccagtagcgcagccgacttgaggttgctcccttccatcgcgtcgcgcgattcttggttcagattttggaagtttgattgaaggtgagagacggagttgtgttctttgggctttgatctggaaggctttttatgtataaactccatccaccttgcagacttggggacacagaactcggttccggaggccttgtcatgttgttagtagttgcattgaactcttaattaactttcactttcatgcaagattggaacagttcaggtaaggtactattgtgaaatcagatttaggaacagcgatgaacagttgcagaatctgttcttctttatttatcaaccatcctctgtaagactgtaacgtgaatgaacacaactttgtgggctacaagatcaaaccaaaacgtgatagtacaagcgtgccattggcgaaggcattgtcgtctacgttacaaggacggggagagatcaccggagcaagcaaaccacccccagtctgtgctcctactcctcgttctcctccctctccctccgcacggccccgaaccgctcgaccaggatgtcggcgacgatcggcgccagctcgtcgcacggcacggacttcttgtacacgccggcgaggtgagagtcgctgccgacgcggccgccgacgaagatgtcggccgcctcgacgatcttgccggcgctgtccttggtgaggcagcccatgaatccgatgtcggcgacctgcacctggccgcagctgtttggacagccggtccagtgcatccgcaccgcccggggcaccgacacgagcttctccacctgcgacgtcaccagcagcgcccgctgcttcgtctcgatgatggcctggccgcagaactggttgccggtgcacgcgacgaggcccttgagcagcagcgacggctgcggggagaacttctgaagcagcggctcggcgagcagcgcctccaccttctcatccttgacgttcgggatcacgatgttctgctccacggtgaggcggagctcgccggagccgtactcgtcggcgaggcgcgcgagctcgaacatgtccgccgcctgcacccgtcccacgggcacgtgcaggccgacgtaggacagcccttcctgcttctgcgggtgcacgccgaggtagtccctcctctgccatttcttgtcgatgaggtcctccggcgccgcgcgctccagcacgccgttcggcatcctcttctccacctccgaccagaaaacctccatcccctgcaattgccaacgccgcaattaattgataagaacattggaacatacgtaattcagacaatggcgtggaaaaaatggctcacaagttcgtcgatgagccacatcatgcgggtcttctggcggttgcccctggtgccgaggtcgcagtacgcctcgagaacggccttgcacaccgggatgatgtcgtcgccggggacccaggcgtcgagcggcagcgcctcctcccacctcttggggctgatgaacccgccgacgaggaggttgaacccgaacttgccgtccttcaccgccggcatgtacgcgagatcgttgatgtgcgggtgctcgtacagatcgtgcgacccgatcacgcacacgttccacttcctcggcctgccaacaacacgcagcaacaacaagtcaacaaacatgtcagagatcgacgacacgaacagcacgagcatatcaagttgattcgattactgacaggttggtgatggtggggttgccctggaagttgctggtgatgtaggagaggaggttggtgtaggatcgggtgtcgacgatctcgtcggggtcgatgccggcgagcgggttgccgacggggttgcggacgttgtccatgccgctctgaaggctggtgaggccgacggcgttgagcccgtcgaggatggccggcacgtcggggagcgtgacgccgcgaatctgccagttctggcgggttgtcacgtcggcgcagccatccttgccgtacgcctcgatcacgctcgccaggtacctcgtctgctcgctcgtcgtcacgccgtttggcagcttcagccgcatcatgaaccgcccatctgcacagcgtagagccgtagagcggccgttagcattttgggccaaattcactctgggcccccaaaacactagtatatgtttagcaaagagtctaattaaaggaccacgagcccacggctccagttgggccaggtgacggaagagaattttagccgtgagagtcagtatattccatttcattggtgtggctaagatagttgatcttttgcttttctagtttgttttaagaacatatatatatatatatatatatatatatatatatatatatatatatatatatatatatatagctatatgccattaaaaaactatatagtatataccgcaccaaccaaccaatgacagccaccaagtgagccttttcaacctagtaataaaatgtaaacagaacatagaacaaaatggatatgtaagcttatgtacatcctgcagatgaagtagaattgtaagggaccaaaatgactttcgtttttctttttggttcaatcagtacaaaggccacacatcagatgctggcgccaaataaagtactcatactattacttatcaaacggttgtgcgaacattatgttacttgttagagcctgggactgtggctatatgtggcacatggagatgaagtgattggatcaaaggtttccatgtttgctcaatataaatagtcattactcacgagatcgtaattaagctataaaaatcacagcaacttaatcagtcttaattatgttgctgaatgtgcatcttgaaaaaacaaatcagcagaatatcttggcgaattaattgaggtaattcttcctcggcgcgacagatcaactaaccgatcgaaagcaagaaaatgtgttgaacagaggagcaaaagagaggcatacactgatgcttgtggcagtggaagaggccgagccacttgagacgcacgtcgatgtcctccttggagagcttgtcggcctcgatctcctccatgggcatcttggcgagctccttgatgccgccctccatgaacaacgatatgggctccttccccagcttcaccttctcctacgggttcagccctgcccggtacttctccttgagcacctagtaccgcccctctcgctgctccacccgcggctccagccgctccgccgacacggcatcgtccgcgaccggtgtcgaggaggacggcgcggacacggtcaacgactgcacggggcgggtgcggacggcgggagggcggcggcgggatgctgccacgtgtgaggacggggggagaaagcgctgtagggaggcggaagaggccatggctggagacggtggtggtggtggtgcgctgttgcgatgagggtggccatgggtgcggcgcgtgtggttgtttattgcagaggagggagggggcacgagggcgctgttgttggctcttggcgagttcaaaagggcagatgctgcgagagatggcagccacgggaggaaaatttacaaacatgcccgtggcccggcgggtactgttcgtttggttgtgctggtacggaataggagctcgggtagacattaacatcattttgtcttgtgttgctatcaaatggtttttttttcccggtgtttttcatttttggaaagcaatggtggatccataaatttttcaaagcttggacaaaaaaacctatggcaaacggttaccgatatcagcaatatggaatatcgacgttttattatacgtcggtaagcctaggcagctaatagagctgtcggatagttaatgttgttatttgtaaagatttgtatcctgacatagtgtacattatgtatcgtagcttttgttagttgatttctcgtctaacaaaccgagagaccaagtcgtaaagggcgtggtccgccccatgcctaaatcacacactttctaaactgtacgccatgattggtgatacattggtgatactttttaggttttgtttggcaaatagagtagggaaataatcccattctccaaagagtaatattgtatcctaaccatccattcttcaccctcatttaatcctaaccattcatacatttcccttttccaaaccccctccctcctctcattatccatttgccaatgtacattagtcccccatattacaccagcttagtagtatctatctatctatctatctattatatactaaaagtccattaaacttcctaaaatcactctcaagttaacatgtggcatcctaaaaacactctcaagctgccacgtggtgcgaccagaggagataaaggacccacgggtgcaatccatgtatttgcgttgttggactccaaaattcagcaaaaatcctaaaaatttaaggaaaaaatccacgggtgcagccatgtacgcatgtggctgctttccttccattctcttctttttctacggtagttaatagattttttttaatcagtagttaaaagataaaatttctaataaaccgcttgatctaccaaataaaattctgaagtcttcaaccttgctgtttttcctctgtacgcatgtgccctttttcctctgttttttttttgctgtggttgttataatcggttgttaaaagataatcaatgcccttttatggtgacgaaatttctaattaactgattgttctataccattagatctaacaaataaaattctatatattctccgatggctccaacaagtatgcatgcactcttctttgcctttttttctgcgatagctaaaaaatatatttaatgcccttttatggtaaaagaattttgcatacatgcacattgatgtcccacatttatagtaaaacacactatgtccattgttataatatttttcgctcgattttagaggcaggattttagaatttttaatacacatttaccccataccgagttgtacactcaacacagttatctttacatcccaaattttagagatcaaaagcatttcaaggacatagaacatagatatctaatattccaaatgaaattgcacgcatgacaaagcgttgtatttgagtcatctaaggtgatcacgaccgctgcagcgctatagctttgccacatatcaccacgtggcagcttgagagtgtttttaggatgctacatgtcagcttgagagtgattttaggaagtttaatggacttttagtatataatagatttgagctaaactgaaacaaattttgttgaatccaaagcctattataaattgcataaatcatttgaacttttttgcttgaagttcaatatctattctttaaaaaaattgaatttcttaaagtttagaactccaaaacgaagatttgatatgtattaaaaagaacatatagattagatgatatatagttcgtaggaaccaactccatggttgcgacgtaatactttcctatacttcatggttgttgtaagtaattttattttagaatttatatattgcaagtataattagcattcaaaatagtcacaaacaatttattgacaaaaattaggttgagaataaaagtaggaaaagtcacgcatacacaaatattcatatgtgtagagtagtatttcaagcaatactccctccgtcccataatataaaggattttgagtttttgcttataacgtttgaccactcgtcttattcaatttttttttgcaaatataaaaaataaaaaattatgcttaaagtattgtggataataaagtaagtcacaaataaaataaataataatttcaaaaaattttgaataagacgagtggtcaaacgttgcaagcaaaaactcaaaataccttatattatgggacggagggagtattaaattttagatgcccgcgcatttgcgcttcctttatagttatataaaaggagagaaggccatgcaagtgaagtgatgatctcttatgcaccaatcctacaccttaaaaccctaacatcaccatacatcccaatcacaaggaaatcactgggagggacccgaatagctaattctcatttctcacaaccgactgttgtcaacaacactacaatcaccattgtgagagaagttggacgttgcaagtcaatcaccagcgatgacgccttcagctaaagcgggagatctcactggtgcgggacttctacatccacatcgacaaactacaacagtagcaacatatgtgatactaatgacttcttctacatccggttagtaccaccaaattctgtattagattagatttggtgatacttggaactcctaaatttagattagatttcgttttaaatttatgttgaaaatcgctcagttttccaacagaaaaagatacttgaaactcctacagtcaaaatatgaacgtccatactataaactatctgaggcagaacagtgctcccgggcttaggcaattcagaggcagaacagaaaccgggggctttgcagagcacagcagttgtttcaaagggtttagcgacatgacgcagatgcatgcgactgcttcacaccgaaggcttcgcacgcgcccttccacccaacccaaaacatccagaggctccagccacccacagggggcagggccaacgtcggggcagcttcgtaatctcgcagcgcggccagaatttttgggtattttagtttaggtggaggccgcaaagatcagaccaacacgataatagttaaacaagcctgtctagatacaccggcagcgaatgagaaacggcccatgagccgtcgtaagggtggatctgcttgtaacgcatgtcgttcttctcaccaaatttctctcgtgtcggatcgtgctcgccaaagtgcagaggcgtgcccttgcttctcactgtgtgtctcaagactctgaacctgaaggagaaaatgaaaaattaacatgcgtcgatgatgttctacgtggagcatcgacattggcaatgttgataatgatatactcccttcgtcctataatgtagcaatctaaaatgaaatgagacacatcctaagactacgaatctagacgagaaatatcgatgctccacgtagttctagattgctacattagagcaggtacaatagcagactataaaccagctataaacatatttaaagagataaaggaagagagagaatagtagcgggatacatatctatagccagctgatgcacagactccaagacgtaatatatgtataacaggtgagaccagatattaatagtataggaagcaactattgtatgaattgtctattacattacactggttatagataatttagaactagcagtgagctacaatattaaacctgctcttatgggacggagggagtactgattataacacctaaagtcctgatgcgacgacacatggttcttctttttcctttttctttttctttttcttaggcagcaacttatgtttttctgaagcctgcagatgttacttacacacctgatatactgatactattcagcaatggtggcgatgaaatcatcgtgccatggggacagcaaggcaggcagctagtggccaaacgttcgaaaccacacgccgcggcccttgtcctttgatgcgtgtgcaagggcgactttgccttgcctatcctgctgatgcaccagacagacagcgtctgcctcttggacgacgccaacctcctgtccttccttggccagtctctcgcctgggcctccagcccgcagacaacagatagagaccacgcaatttaacacacacagtcgttttcaccaaaattgtcaacttccgtactctccaatttaagctttggaatagaaacatcagctgagattttgattttagacggatatggctgagaagaatatggaattgcaacattcagccaagaactagcacatatataacttctcaagaatgagcgtgctgcaaagtcaggcgaagttcaactggaagactaccctatatgtacacacaggagaaggaaattgtatcgagcccaacgagatacttagaacgggaaccttccacgtgtgcttgaacgtatgcaagatcacagggcattaagggcaaatgggccaaatcaaaatcagagaaatgttacaagaaataattttacgagtcactaattcggtaatcttgcctcctgcgaaaatgtctgagaatgaaactatctgcatacatggggtacttttgtcgtatgagacctttgatgcacttccagaatgaaaaatcaacttgctcaccatccttcctaactatgaaaagacatcttgagttctcaaattctggatgtaaccctacctgcaaagtagcgctaaaggttagtgtccagttggagtaaacaaataaagaaatcaccatttgtagctcataaccatattcaattcaattttattcaagaaaaaaaacgcaagttatttaatacacgatacaaaagtcaaacaagccaactaaaaaaaactacaacaaaatagtgacatttctattcagaatttttgttaaaaataaacatgctgaagtttgttggtaatcgtgattcatgggactatcaccttgacacatcaattacaaaataaagttaaactacaagctgtatgtctagaagtatattgagagctgtaaatcaaaactttctgtgctcaacactcaacagcaagaagagataaagatgataaaacattatttctttgttcttcagtttcgaaaaaaaaaagaaaaaaaacttgagtgtttcgcctctatgtcttaggagacttccttatatctgagagattacataccgtaaggtagtcaataccgcatccaattttcttctcatattgtgggtgataaggaagcaatcgttccaaaattgccttttcatgttcagggctcagtcgatcaccattttcatacctgcagcagtttcaatatcataccctctcttttactgaattctacaagtgcaatatatatttaacttgcaagaactagtttatgaaagggaatacttccagatgttcaatagacaataaaatataaacaagctgttgcaccttaagtatttcagttctgttgccttacaattatatcttgctgattgtaggcaaagcatggaaccacagtccacatggcatacctaatactataagaaggttgatacggtgaagcaatttctgacttgttatacttcaatagtaagaagccatgataacaaacaacacatgctttttgggaacaatgcaacaacatcgtttcttacattaacacaacatatcaacataattaaacaattcttccacacttaggatgctaaaagtgcatgaatcacggtgaactcattccatccaaaaaatggaaaattatatgacaggcacaaatattgctggcatcattcatgtgttctgtgatgtgtgtgcaactgatcaaagtttcataacacctcgttttatgaatcataaactgttaggaaaaattgcataaggcacgtgacactgatggtaagagaagaaaaatcatattttggctgtctgatatccatagctaattggttgcttgcatgagcatgatacactttaagattattaataaaacaaataagatctgtaaagaaaaggtgccgtactgcttccttgaaggaacatgtgtaatataattgtggcagctacaggcaggtgctaggactgatttatatcagatgatggtctggtgtgatgaaagtagatgaatatgaggaatagccaaatagagatatattgtcatttgagtaaaatacacggctggtccttaaagttgagcgcgggtgtcacttaggtccataatcttgtaaattgcacatctaggtccactatcttgtttaagtgactcattgagatccaaaggacctatgaccgggttgactggcttacgtggctgtcccgcatggcaacatatttgcattccccccctttgcttcctcgtgtctgatccaatcccttcttcgcatgacgcacgccggaacgtgccgacggcgacgtgcgccagcacgcgcacctgcggcacccacccgtctcaacctcgctgcgcctggtgacgcgcctcgtacccctccggcagccgctcgccggcgttgcgccgcgcccagaggaaccgcacaccgtcgtcgacgggaaggagaagaaggaggggaaggggaaggcccccactcctgccagccgcaggtgcacgcggcaagcggctgcggcaactgctcaagtcgagctcgccctgccgccctgccgccgccgtcgagctcgcacccgccccgctcgcgccgagctcgccgacacctcccccgcacgcacggccgcggtaggcgaccactcccccgggacgcggccggcgacacctcccccgtgcgtgccgagctctccaatgcctctggcgccaatgaccagcgggaagggagaccggtggatctggccgtcagtgaggcgcgagcgccaccggcacgctagctacgaagatggtgacggtgctccgagctcgcccaccatggtcatggcgacggtgctctgcaagctctcctctagttcccttcgccgcccgcaaactgctgccgcattcgcccatcgccgctccgctcgcagcccgccgccgcgcttgcccaccgccgttccgcccgccgcccgttcttcaagaaggatttgagggtggggcggcagggcgcccgctgttgagaaggtgatgctcatctcctgcaccggcaccacggccgacgtgttgtggcaggacggcacattgcggcgcggcgtgccgtccttggagttggtgtcgttcgacatcctcaacaaccacgagttcttcccgggtcagcacgtcgacgttgacaccatggcggtggcaacaacaacgacggcgaggcgcgtcggctttgtcgaggtccacgacggcgcgacgtcctgatcttcgagctcatccaccggtcgcttcgtcccctctaatattgtgtcgttggcaatcatgcgccgcttcgtcgaggtccacgacaacggcgatggaggacgctgatgttggcgaggcgaggccggagaacgtgacaagcgaggcggtgcagccgtggtgcgcgacgaggcgccgcagcagctcggccatcggtatgacgtggccagcgaaggggctggcgatgaggatgacgtgcgatggcgatgggcgaggtgacgacggaggcagccgagggatttggggatttttttggtgcccagggctctactgtagcgcgaaggggatatttgcaaatgagctgtctacgtggaatgcaacgtagacggtcagcttcgatcaaaccgggtttggacctcaatgagtcacttaaacaagatggtggacctagatgtgcaatttacaagattatggacctaagtgacacccgcgctcaactttaaggaccggccgtgtattttactcgtcatttggtacaccaaaatatcaaataatgattttgaactaactcatgcaaaccacaatagagtaaggcagtaaccagtaacatgtggaatgaattacattagaacgaattggcacaaacgaaaaccctaaatataatcagtttactgattagtcatatgaaccctgatacaaggcatatgctttgctgttatgccataattataaaaaattgcacttggtactggtggaaattggtctaattgtgcttggccacttaataattccataatgggatccgcataataagtttagcttgcacaccatatgttcgatgaattgtgtttcgaaggaataatggtctttataatccttgtgccatgtgacaacataataacacatctaaatatgtgaaagcaacaagctttctcaaatgatattaagccacgtcatatgatttatatgagccgttggatgcaacaaaaattcagcccctgccgttggatgcattgtgtaaaagagtctcagtaaaagagagcaaacggtcaagaatattctggataggttaggaagaagggaacgagagggaaagaaatccgctcctgtgccaccagccgtcgcctgcggccgtgccttgccccgccgccacctgcacccagcccgccgtgcgccgcccccgtcagtcccatgcatcgccaccgcctgcaccagcccgccgtgcaccgccgccggcagccctgtgcccctccgccacctgcgcccgtgctgtgcgcttccgccacctgcgcccggcccgccgtgcgccgccgctggccgtgccgtgcgcccgatgttcctgacggcgtgtgctactgcctgctccaaccgtggtactacgccactgctcctctaggtcccatgccggtacagtggcaaggcactggcgaggctgcatactgaatttaggtcttttttctgctgccgtttgagcaatctaacactgcaaggcagtctacatacaacatgcagactttgatttactctttaccagccaataagcaaataaataagtcttagtccatagcaggttagaatttagctgatgacttaagaattcccttccatatgctcaattcctgcatacaatttccaaaaggtgaacaaagaggctgatgatatcctctctaccagatattgtttattcattcaaatagatttgttcactcattttaactttgagttctgggttataaatttcagctggaagtcctcatctgaagtttgggttggagggggagtagtacagtatcatggtcattgatcttcttggttcaattctagatgacttaatcaaccactgcaacagaaagttctctcttaaaacagtagttatgcttactgatcaaatggtggctttttctaactgaatattttattctagctgttaatttcaatttgtaacattttcgacttgcttgaaggaacataaagcactggtgattccctccactgtgccctttttgaatcctactgctacgaaggcaacatcttttcttcaattctgttattgccctagaatgagcattttgtttttattgaaaccaacggcaagaggtcaatcttgaatataatattttaacctttagttggaaatacaggtttgtctagacttaactattcttgttctcaggttatacaattttgcatagattcaaatttaaagtatacaatttcatgatcattataattacgacgcatatctaaatatatacacatggattttatacgggaatacaaagtcgtgcaacgcacgactaaatggctagtgctagtgtgaattacaaattccatctagaattaaagtgagaagaaatgatagttgcttacttgccggagtgcagaatcatccggacgaagccgacgagcggcacggtgtcctcgaggatgaggtcctcccaatccacccactccctctccgtccccttcctcctcccctcctccggcgtctcatcctcccccgaaccaccacccggcgaggactccgcctcgctctccccctccccctccccctccccctccccctccccctcctcctccgcagccgccgtcgtcacgaccgccggccgccgcaggatggcagccgggtcgggcgtggcggcgctttggccacgcgccctcaccgccaccccgcagccacggccacgggcgacggcgacggaggcggcggagagggggatacgcccggggacgaggcgcgggcatgagacggcggcggccacagccacggccatggggtgcatatgcgcggcggtcgaggcggtggtgggttccggccggtcacggcatggtacggccgcgcggcgccgtgccgtggtctgccgctgctgcgcgcggtggggctggaagaagagggggggaggaggcgaggtggtggttcggacgcgggggtttggtttccacggcgaggttagttcggtgtgggtggtggtggtggtggcaagtagtggctgggaagtgaggtgcgatgccgcatggaggagtggataggtctctctctcctttgtctctcgggttcgtcccgtgccgggagcgtaggcgtggcatcttgtttttctccagttcttttcttgtttctacggcctcggcctcggccagaagccgcgccacggtgagaggaaacgatcaggtggtgtgatattttttttattcaccggggaagagtccggctcaggtgcagggaaccctgcacatagtaatatacaggccaaatcaaattgcgacacctgttcagggtggccctacttaattacgcatgcaacggaggtttaacgaggactaaacgggtgaatggttctgttacctgattttgtgggatcgtggttaaacctccgtttacattgttacttggttgattgggtggacctaccttgtgtacaggtgtcgcgatttgatttggcctgtatattactatgtgcagggttccctgcacctgagccggactcaccggggaaaggtcaattttgattcgccttcaaactagggctgtgttcgattgtggggttggtaacccatcccctctgcacaaaaacggaacggtccatcagcgcgtactaattaagtattaggtaatttttttaaaaaataaattaatttgattttttaagcaattttcgtatagaaacttttttaaaaaaacgcaccgtttagtagtttgaaaagcgtgtacgcgaaaaacgagggagatgatgttgggaacctgatgcaacgaacgtagcctggtctgtaacatatttttaaaaaaacaattctctgtagcatatattttaaagtggtttcttaacaggatatctatatgacagcccaatcattaaaaataaatctacgtgtaagtgatcatctctcgtatttttcctcgccactccccctccccctcctactctcctcctcatcctctctcgcaccataaccgacgagcccttgagcgacctccaagatcaaaggctggtggcacaagttgatttcctcttcgccccttccagtcagcatgtgaatgtaaacgacaacgtgccttcagagctcccttgaattgatttggcagcaaagagcagtgaacagcgaggagggtgtcaatctccctcccaccttcctcctccatctcctcgagccttgtcaaggtctcgtatgctgacgccctcgtcaagctcccacgccaccatcaggctcctcactgcctacggctgcaccacacataaaatctatcgctaatgtaaccctttgcgcacatggttgtcgcttgttatctttccaaatgactcccatcccgctcctctacctccacacctcactcttgctcctcctcctcttcgttgacgcctctatctctacccaccacatctcactccatgtcaatgtgtccatcgctaggttggcctcgctttccctcgcattactcctaactggatcatcacctaccatgcttgtgacctccaccttgtcatacatctggaggttgcgtagagctctcctcgttgtgctgccagtagactcctcaagctcccgtgttaccaaccaccgtttgccttctcctttatcaacattatgacggtagcatatataagcttcggactatactactcgttgtccctacctttgtttggtcgccatagccgttgtgcatggcttcctccacgctctccagagtttgatttgctcacacggttctaccggcactaccactcgttgcctacaatcccaacattgacctcgtcctgatctagactccttccctagaccctacctgtctgcttcctatcatatcgtgccatcgcttatcccgccaatgaggtcatcctttgtacgccaaccctagtgaccattaggaaagacgggagagatcgagagagttgagggtgagaggagagaggtagagaaataggatagggtccgacgccaccgattaaagccgggtcaaacatgttatataggacaaaatcattgttcaatccggttggggaggcaacaacgaactggttttcatagctgggaaagacgatatacctaattttatggttaagaaatgtgaatcagattcgggcaaataattaaggatgccaaaatggactttgttccttttcaccacgcgtatcatctgcgcagatggtgcatttcggctcttttatggaatcgccatgttggcccaacgtgatttcgatcgggacagcccatgccattcaccgtcaggcgggtttggttcggtctgaggaggcccagccgctctcctcttggcaggctgggcgctgggctgtaggcaatcacgggcctcctggctactagctgttccctgccgcgcggggcgtcgtcgcccttcggcctttcttttcgggtgcccgtcgtcggtccaaacgccgccaccgacgccggagataccgcgcaacgctaaacgctgagcgtcagcgatctaaaataccaccgccgcgacatgcaacaagacgtacgagaaaacctccgcacacactgagccgaaccgaacagccagcgagcgaccccgtttatccggccaaccaccatccgatcgtgctgcgtacgtgatgggtgcagttgcgatgtggaaaaaaagccgccctataatgggatgcagctggggcaagagggaataataacgaacagcctccaaatctatcgtctgaaaatttcttcgtggagaaagctcaaacccagccgctaaaactggtcaagatttcccgcacatgctgctagctgcggccgtttgacatcgctgccgatccatcgtcaggtattccgtcgagaccgcgacaaaaacgaaaggccgaaagggtgtggaatatcttcaaatcgaaggcatgcaagagcaaagttttgatccagccaattagggccggccggcttctccactaatttaaatcttttggctcccacacgttggagttgatacgggtggaggacccagtcgcccagtggtcgtgatgaccactcctgcactgcaagtctgcaatgcacagctctgaaatgaccaacatataaccagatttgattaatgtgcagcttaagtcatgcttctccattagcagtaccgtgatggcgaaggcaaatccagtaggcatcggcaaccctgattcgttaataccctattcccacagcaacagacctatactgaggaagcattatattgctacctgtattatctgtggctgagttctacctgctgattctgtcaaattttgggagagagatataatttatgaggttccagccttccaggttgatgtttaatggcacttaatgcattgaccattgacgaaaaactagtgtcggttccttgttagttccaacccaaggtcaagtcctctgaaagagtacaaagatgttccaggtgaggtcattgttaggtgtagtattgtatttgtctgaataatcttgccttcttctcacgaaactatgttgccatttcgcagtgcgattaatgcaggtaacttctagtcagctgtcatgacatggactcgaagggaaaaacaactgcaagttgtgttgtcactgcataatggttaaactaattaaggcttttattttcttctgaattcagaactggcaggttattattattagaagcaaatgccaatttcagcctaggaacgggtcaatgttcagtttggttgtactcctaactggctacttcattattttacacagagaaaacaaaacaaaacgcttgtttaatcgccaaccaaaagcaatagcgaaaccactcggcagttcagctagacgcaacaacatcatagagcatacatatgcgtatctttatggctgccaatgccgtgaaatctccccaatacctgcaattataaaaggacattattgaagtaggtcgtcatccttctcattgttttacagattggccaatcagaaacgacgagcaagaacaagttgctcctgtatatcattgcacatcagtaccatctttataccggttgttgagacttgggagccgtccatgatgtaatcaagttaagaggcggtcttccatgacgacattgactaacaagaaaagtagcctcgcttatcaaatgaagctctcttctgatttatttagtagcaatgttgtaatttgactaagcagtaagcacgcatcttgaatttttgtcaacttacatatatacaaaatcaattgaaatacaggagggtttacattgctttctagaacattcagtgaaaagaaatcaatgaaatttcagaataattctttgttcgaaacatgacccaaatggcaagttaaaagcaccaactattttggagagaatggcattacgcgcagctattgaaagctagcactgagtattaagcaaagtcaagtatgccgtgcaaattatggcatgtccttgttcaaggcacgtcagggatttcgttttcttgacaattttagacaagtttagaactttcgatcgaacagtgtactgtgatatgctactgtgcttccattgcctttggttgctgaattgccatagttttttgtataaagttgaattgctgtatttagaggaagtgtcatattctaaatgggctagatatcttgtcaagctactcttgcaaataagtttgaaatgaactcatcccctcggtacaaatcattgaacgtgtggatcagacatgattaggaatgcttaattgcgattggcaaaccatgaaatcctggtgagaacacaagttccattgtgttgtcggaatcagattgattttctgatgtttatttctgggtgggaaaatggattttaaatatgtctgcagatatttttgtattgtcaatccatgtcgagagggattacgattgatagtgagatgcatgagggattgtggatactcaatcatgtaaacgttgatcgatcattcttctttctgtgcaagcaactcttaccacctaatgtggttagctgatcaagcaacggcaatgctatttcgattgcaggactttcacaaatttcaagcagtcaagctaaaaccgattagatcttggcatgattttttaaaaaaccttcccatgttaaaaccaaaatcaagcatgggctcttctaattatccaatttgaatactgataaaactattcccttcgtacctcctaagtgcaaaatcttcacctgattattaatacggaacaggatatggactgtggatcgattacagaagagaggatgggtgaatcagtggatctgcccactatgctacaccactcagaaaacatcgacgcatcttctcgcgcactgcaggttctccaagcgaatctggcaggagatccaacgctggattggtctagacctcgacatgtagaactggggcaaccgcacgtccgtagaggattggtggtatcacctcatgctgaggttgccgagaccgaccaagacgctgaagtcgttaatcatcctcattgcttgggagttttggtgcgaacgtaatgcaaagattttccaacacgttgacaccataccaccaaggcaccaaccattattgcaaagatcaagaaagaagcggttacatgggtgagggcaggggcaaccccactagcagagttcatattctaggaaacgcggactaactagacttttttcttttggcttttgctctttgtccctataaatatgttctatcaatatatactaggcaaagcttttgccccttttttttgaaaaaaaatctaattggttgaaaatgaatgagttgtttgcattagaatcggtgtcccataaacaattattatgttgtattaaaaaattttagtcgtataaattttacacatattattatattgtaaacactaattacattgccatatatttaaaaaatattatcttttactgtatcatcataaagtttctctgactaccggtcccacctgtcatcgacctgcgctcgtaaggcagccgagcagggcactcgtgtcgtacaaatactagtgtgtaccgcatcgcactgaaatcacaaccgaacccaccacagattcaaacgggcgaactcaaaatcggcgatttaaacggcaataaacgggtgaaattttagtgcatttgctcctcattcccgtgagtccgtgacccaaattaaatgcctttataattactgccctccgattcaaaccaccaccgttggatcaagggctatatatatatataaataaaagcttctttccctcttacgtcggcacacgtcacgcagctgaccgcgcaaaggaaaaggaaggcggcggcggcgggaggaggagaggataaaaatcccatcgccgcggcggcttcgagggcctcgaagctctcgtctcccacatccccccttcgcctcgcggggcgggggccggaggaggaggaggagggcggcccgacgcgacggcgtacgggcggaggaggacggagagggaggggccgacggctcgccgccgtcatggagaaggttagccatctgatgaacggcggctgcggcggcgtggggaagaggaggggccttccggcggcgggggtggggctagggctgcagaagcagaactcgtggtcgccggacatggagagggacgaggcgtgggagcggcggcgcgggatgaacaagggatcgtcgtcgtcgtcggcgctgcggcgggtgaggagcgtcacggacgacgacctcgacgagctgcgcgggtgcatggatctcgggttcgggttcgaggcggccgggtgcccgctgtgcggcgccgggaggagccgcctggtggagacgctccccgcgctggacctctactacgccgttcacggcaacgccggcggcggcggcggcggcgcgggcgaggtttgcgccgccgcgagcccctgctcgtgcggcgcctcctcgtcggatgtgtccgaggagtcgccgctcgggagccccatgtccatactctctccaggtatgtatacgtgtttacctcgtactcgcaagtcgcatccacttcattgatacatcaatcgtgctgttgttgattatacttccatgatatatatcaatcgtggtgttgattagattgagagaggccacttcctagatgcagagcacctgtgaatcttatcagagaaaacagagatttttcttttctgtaataaatatgatttaggtctcgtcgtctcgatgttttggtattcgattattagttaaaagttttggattttgatttcgattctgattgatcgatgtggtgcaggagacacgccggagacggtgaagatgaggctgaagcagtgggcgcaggtggtggcgttgtccgtgcgcaaccgttgctgaactcgtcggcgacgccacgccattgacatcttctcttgcatcgagaagaatgcaagaacgaaaacttagaaggataagaaaagaatatcccctgcctcgatgcgtcggatgcgggaaaaaaaaaaggaaaatgaaaggaatttagggtttggtgggccgccgccttccaccctccggccggctcccctcctcctatctatcctatcttgaacagttcaagttcatttaacattatcataatatcattcagtcattcagccatcctttttctttactttagcagatttcttgcttattcccctaattcagatctttatcaatcatcaatgtaaatccatgaggtagactaattttatttccaaaaaaatgattattgctcatgctcattgctctcaaaattcgatgaacaatcaaccatgcaaaagtgaaatgttctctgcaatctgcatggagacgaaagaatctgaaagcctgaaattcttcttgagaaagcgtcagccgtgaagcagagcagacggcccggtttgatgcaggctttgcatcatctgtacatcgtcgtcttcgtcatcgatgtgcagtgcattctacggagaattgtttggttggggtgggcaggacaggctgtggtccggctggcgccgaatgggggaggagggatgcacgcagcgcaggcacgtacagttgggcgtccctgtccgtcgtcgtcttggcacggcgatctgtctgtctctaactggtacgggggctctcgtctctttctcacttcactctacacacacgcagggtcacacccgtcacgttcgtcaggcgcacggcggcgtcgcagtaaacagcaacgccgtctcgccgtgcaaggtttgctggtactaacccggaggtcaatcttgtgttaattggcgtgcattgatgcgggctctttttgagtggcaaacggtgctcgtccgttggcgccgcgacgtacaggcattacggctgtgtttagtaccttccaaagttgaaagtttgggttaaaattgatacaatgtgactgaaaaattgtgtgtgtatgacaggttgatatgatggaaaaagttgaaagtttggatccaaagtttgtatctaaacacagcctacagctcacgatagaattgaagagctatagctagctctgtcagtgaacgtaaaaagtcagtgaatgtaaaaagaaaaggctctgacagtgcccttcaagtggcacgcgggtgtgtcctgtgctgcaaaaacgattttaccgcgacttctgagagaattttagcctgactaactaacgtgacctctgagaatgtttgttatactatccgacgctgctaataatacccaattggtgaaagaatcgtgagatgcttgtccagattctccaggagagctattccgatgaagtgatgaggtgaaatgagatgccccctcaggtgctgcacgtgtctggacagcgagttggatcaatcccggagtaggatggccacgacggagacggacagctacacgaaacgtcccccaaattcatgtcgcgtcactggccggccacatgaccaggcgcccccacattgctcgtggtgttatccatgataagcaatgcgtttctcacaaatttggcacaatgctatacagtatacacacacagcccagtgccatggttcatataaattcagatacatcttgtccaagtgttatccatgataagcaatccgtttctcacaaatttggcacaatgctatacagtatacacacacagcccagtgccatggttcatataaattcagatacacgttgtccaaaatgggttcatgtaaattcagatacatcttgtccaaaatggcaaggaaaagtacatatgtataagttcagatacatcttatccaaaatggcaagagaagtacacaaattaagaacaagatggtaacaccgacataggttcctacagcagcaaaatacaatacaggtagcaggcaccatggttaaataggttacatacaatgcttggatataactcagacaactaaaacctatcgagtgaatatctcaggcagcctgtccgcccaagagacaagcccacggactaatggttggcctacaagggcagatcgatctggcgattctgaactaacctactactatactcactttgaaaggactgtgttctagttacaggtaactggcagcttcaccatcctactactactgtaatcactgctcactttgaaaggactgtgttctagttacaggtaaccaggtcttcagcttcaccatcctacaactactatgatcactgctcacattgaaaggactgtgttctagttacaggtaactaggcctttagcttcgatcaccatggacccgtcagagtcctccgaaggcaaattctctttgctgtcggtccaacttgtcggctcattctctctagaacctgcagaaaccattaacagtgcattattagacttttacgcggtggtgtcttgaagccagaggaaaatctcaaactaggaaacgaaaagcttggaaacttctctcccaaatttaccaggaacaattgtcagatagtatgctgacagaaaaataaggaaccccattttgaagtcattaaaacccaaccaaaggacaacataaattaaatagaattgagtggtgatttgctttttcaaaaatgaattgtacagtttatgataacatcagaggctccattgttttcctttttaccaaaatacaattatgtcgagtagaagtggcaagagtctacaagaggctctttctcagaaatagaaataccaagtatgtgtgctacataccagtattagttagagcaagcattcagtaattcagtttttgtccaatccacattttttcagggttagagtagcctctaaaaaactgatgattctaagtttcaaaccatttgtggcactcccttagcttctgtacacattcaaactagtggtctaagatgtggaaaaacaactaggacatggagggagtgcggtttgaaattctgccgcctcagtgttatgagaacatatccctttttacagagaacagtcagtcttctcagcagagtttacaacgattggcctaaggaggtatccacagattttacagtgttgagagatgtgttaacttcatgtaaagttcagtcaaaattgtcagttaaattgattgtaacaaacaatattgacagtttcacaattgtctatcctgtcataacttttttaagtgttatgttgtggaaaatacagttataccccactacgatggaaacataggcattaaactatacacacatcaaataactgttttttgaataaactttaatatttgcttgcccttccaatgttgcatttagttaaaactgtattattatagatgaaatatcatttaaatggttataattcaacaatgatggcagttgactgatcaattcaaagaatttcttttttagtttaagccatttaaatgctgccacctaacccctgatgtaggaaaatgcaatcaatcacatcgacatcagtccttgcctcattatttctcaaccccccacaaagctttacttcatcattgcttaaaatcccatactataaggtaatagtgtgaaagccaaaactcacgaccagtagctatcaatcagaacataacgtttgacattcaaacaagtgaatcaataattgttaatatacacagcatacattttcctaacaataattgttaaaattcacaccatacattacgagcgaaaaataatcatagagcagagcatatgtatgatattgacagattaggctgtaatactcatgtaaagggtaaaactatcagattttacagagtaaaactttttggtaaacaagtaagctatcagtaaaacagagcatgcctaggttgcacagcttcgttttgtttcttgtttgacattaataagcaaaacatagtacctatccagagcaaaagattttttttccaagataagcaattacctcattcttttgctgctccaacatttcatcctgcacattagaatacataaaaataagttcaaatgctaaagcataatcaaatgaatagagtagctactgcctactagtccactatcctaagggaatagaattgtcaggtcttaaggcacttatgtttgaatcatgtaaagcctttcttttgttttccttctcagaagtacttaccatgaaaggcggacaaaacaagggcaaacctcaaagaatgtaataagacagtgcaaaatgaaataatcacaattgtgggtgtgggtgcaatgcaacattcataagtactattttagttagacttgcaattaagatgcatgataagctacgtatattacaatttataaaatgaaatatcctgtacaaagaaggcaagcaactaaccagcagtccaccaccaaactatttaaacagtttaaaatggaaccgactttgattactctaccatgccttcagttttgtttagaactaactttcaagcgtggaacatatttcatggtaacttgtcagtttagaattagtttccaatttcaagagtagactataaagtaaggggctacactagagtatagcgtcaatacaacttctgtcactaaaagagtggtattgtctatgttcatagctaaaaagatactcttttaaggatggaggaagtatatgaaaacacctataatatttctattggtaaggacctcacttggtcaaatgctctggagactactgctagaaactaagtggacatgtggcaaactagtgacaattgagaataacaaaaactgatagtttaagatttcaaaacagcaatttttttagtttgatgattagcaacttgccaccatgtgacagtgacacaagggtccctctgaaatcaatggcgtatcatcaaatccccaatctaaagagtggcagttcacaggcaaatgaataatatgccagcatcaaatgcttcattggaattccatatgtttgaaagtttaaagattaccaaagtgtactacgtacttcaactcatgaagaagtatttccaaattataacgaacaaaactcaaactagaaatgtaaacagaacatggagagtacctgctttttctggagttcatcgttcagctccttaagttttgctacctcagcttccaattccatcatatatgcctgctccatatcaggaagcacaaattaaatccataaaaaatgacaaaaagttttagaacatcaatagcaacttagcaaggagaaagatatgcttatgttttataaacaccactttgttttatgtttatagcgtgtatactaattttaggctaggcttaatacgtgcaaaagatatgtttatagcgtttatactaattaaatttcagtatgtttgaaccaaatacagcataaactttgcaaatatgaggcacatatcctagttagcaaataaaacgatcagcatgatgataaacatttctcacggttattactatttgttagttgtcgcatcgaaaagaaaagaaatgcttaaaagggaaaatatatgtgctacacatgtcactacaggcaagtactagaaggcaaggcaattcgacaagtaaatgctaaacagttgcaagttgcaacaaaaaggacttttcacctgtttcctctggcgcgacctcgcggcagactccctgttcttgatcatccgccgctgtcttctctcgacaaccttctcgatgcccggtgccttccttcccctcagcccacctttgaaaacgtacggcaccggcgatggcgacagcgacgacaggtccccgccttccatcttgccgaagccattggacgagaccggcctcaccggcgaaaccaacgacgcggcaccaccaccgccgtgtccgacagctcccgagaccagcccatttcccagcgagagcggaggcaccatcggagggaacacattgctctgaccgaacaacatcggcgtctgctgctgcggcggcggcgggggaggtacagcagccgccgtaggagtcggcgccggcgggacgggcgggaccgacatgtcctccctcaccacgccggcccgcacgaggaactcctccagcgtgatctccccgagcgtctgctgccggtgcgccggcggcgggggctccgcggcggccggcgcggtggaggcgccgccgccaccgaagcacatcatgtcgcgccagacctcgtcgacggtcttctggctgagcgtgcgggggagggtcagcgacccctgcctctgaacgggcggcgcccccaccgccgcgtgctccgccgccgccacggacgccgtcgtcgccgtcgtcgtcgtggcggcgccgacggcgtgcgactcctcggccgtccagatgctgcggaggagctcgtccatgttcatcgacccgaagtccttcccgaccccgcccagcgtgctctggaactcgtcgaacgtgagcgagtacaccgacccctgcctcgccaacggcagcggcgtcatcggcggcagctgctgctgcctcccgctccctcccggaaaatccatctccaaactccaaccaaccaatccccaacaccccagcaccaaactcacccaaccaaaccaatcgaaaactccgcacggggagcaaccaccacgcctgcttccccgtaacgcaacgagggatcagagacgggaacctgaggagaggtgggatgtggagctctggcgttggtgaggaggacgcgggcgccgcggcgaggcgaggagaggaaaccggacaggtgtcggcagcgaggagccgtgtggggggggcgtttaaaacgccggcctcgagagcgacgaagtgacaccctccaatctcgattagtgcgtgccgggtaataaagttttagtatactccttcctccccttttcgcaccgcgcacacagcgattggtccaccactcgtactccggtcatcagatctcgcgggggcttcgcagtggggccggggtgtcagtggtgtgggggatctgcggggtggggtggggtgggtcgagtgggataaggtattttaatcgtgtttggttcaattggttgggatgctggactcaacgtggtggggaccacacgggggggaggattgtgcgcgggggacgcgaaacgtggcggcatccgcacgatgctgacgggtggcgacgcgacggactgccctatgggaggacgcgaggtgggagcatctgtgcgggcgggaggggacaggtggacggtgcggatcgtggtggaaccaccaccaaccaggcaatcagccgtgacgcgggccgcgtgagagggagcacctagcattgggctggatagtgtggccttggtgggaagggcctaactgctttgcattaggccttttggataaggaaaaagtacaccacaggtccctcaacttgtcatcgagttacaaaatcgtctctcaaccgcaaaaccaaaaccagatacatggcatcctccaacttacaaaaatcatgcactccagatccttcgatggttttaacaccggttttatcctacgtgacggctaagtcaacatgaaacccacatgggacccagatgtcagcctcttcttcccctcccctctccacctatcttcctctatctctctcttcttttctcacttttctcctcatcagttgggcaggggcagctggccggtgggaggaggccggtgggggaggcgggagtccagcggccgacgacgggcgacgaggcggcggcgacgacgacgcgagagcaggagggcctcaacgccgggcgcaggcttctacgcgcgcgccagcagcggctacgtgcgcgccaccgacaggcgtagatgggcggccgcctgacagcggcctgcgcgcggatgaaggagagcaacgcgagcgtcttgcggtgcttgtaccgccgccacgcgagctgtacggcgacggccgcccacgtacgccacccgaccagcatctgcagcggcggcggacgtggagcctgcgtcgatggcggcagccgcatcaagatactctgcagcttcggcggccgcatcatgccctgcccatccgacgacgccctcaagtacatcgacagcgagacccgcatcctcgccgtgccccgctcgatacccttctcgccgcgtgcagatttgaagaagaaggtggaggagatgttcaggacggaggtggcggtcgtcgccgaggacctcgacgtgctcgtctccgtcacctgggacgaggacctgacccacatgctcgacgagtacgactgctccaaggagaaacggtcgccgtcggcgtcgccacggttccgcgtctacatcttctcctcccacggttccgcatgcaccacgacagcagctccggtgccctcgccgaggaggaggaggacgtggggtgcaatcgccacgacgtcgtcgctgctccggtccccgtcgtgcgtcgtggagaaggacacctcgtcggcgtggttcctaggatagccgttccgcgtcgagaggtgagagagagaaaggaggggaagagggagggtgctggcatggcatcctgacatgtggggtcccatgctgactcagccgccacgtagaataaaatcggtgtcaaaaccactgagagacctacagtgcacggtttttataagttggaggatgtcatatgtctggttttgtggttggggaacgattttataactcaatgacaagttgagggactttcggggtactttttcctttggacaaagtacatcgagtggagtaataacaagtacttcctccgtatataaatatttgacgtcattgatttttttaaatttgtttaatcgttcgtcttattcaaaaattttaagtaattattaattctttttctatcatttggttcattgttaaatatgcttttatatatacatataattttacatatttcacaaaaaataacggtcaaacatattttaaaaagtcaacggcgtcaaatatttagggacggagggaataattcagtatacgtgtataaaatattattctctccaagaaaatcaacatctacctcatcgcaaagtctcctcatcgcgatattgtcgattagaaaaataaattaagctcctctgaatatctccctatgcataataataacaatatatcctctcctgattatcttcgtgtagataaattatcgctgtctcgtgaattggcaaactaggccgggctgagtccggcgatcctggcgcactggtgagcgacgacgtcggccgtagacttgctgcgctcgagcaccacctcgtagccgtcggtccagctctccatcccgggcgccatcacctgccagaagaggccaccggcgcacgcgccgccctcccgcgccgacgcgtacaccgcgtcgtacaccgtgcggaagtaggcgtcccgcgccgccaccgtgtacccgttcgacctcgccgaccacccgaactccgtcaccagcagcggcttccggagcaccgccgccgagtcgcggatgtggtcggccatccacttcctcatgaacgccacctgctcgtcgctgctcgcgccggacaccctgccgcaatatgatttttcaccagttaaattaaccatatcacactggatggatggattaatttgtcattcgtgtgctataccattggtcggggtaggagtggatcgtggcgaagtcgacagcggggacgaggttgttggcgatgaagtcggtgccgacggtgtagcccgggttgaagttcttgtgcatcgactcgccgtagaacccttccagcccgatctccaccatgtggttcggatccacggatttcacgtacccggccatctccgtgacccaagcctgcaagcacattgatcaaacgatcacaaattagtacatcttgcaacacatggcgtgatcgggccggtgacgaattaaacgagggttaaaactgagttttgtttacctgaagtgtttttccggagaggtcgctctggcagcgaggctcgttgatgagctcccatgcaaagatggtcggatcgtccttgtacgccactccggttatcttgttcactctggtcaggacggcctgttgcatgcatgcgagcagaacgtcaaatcgactaatcgaggacgttttttactgtcagatatgttttttcctctctttttttcaggttataaactgtcagcgtatcggatgttagctcgtgccttgacatggtttttgtagaactgtttggtcacgtcgctccggaagaagtcgtcgtcagagcccaggttgtgtccctgatccctagcccactgcacgtactgcttcttcccgccgaatccgtcccagttgttcaccaggctcagtatcagatacagccctcgtttcttcgcttcggctatcacaaaatctagtccctgaatcacacgacaacattgttatccaaaattgtcaccattacgtacgtacgcatgcatggtgtacacaacacgtacgcaacgataccatgaacatgtcctcgttgtacacgccgggggacttctgcagcggccggtagccgccgtcgctgaacgcccacgtcctcaccagcgtcgcgcggaggctcgccgcctgctggaggacgccggccgccttgctccggtcgccggggtcggacgccatgtacatgagccagtacgcgttgaagccgttcgagtagaacggccggccacccaccgtgaaccgcgtcccgctcgccctcgcgaattgcccgttggcgacgtcggccgcctcgccggcgtgcaagaggacggctgccgcgatggccaggacgacgacgcccaaagttggcagcaagattactcgccgtttgctccccatgatacgatctatgttgtattataatggatgttgcagtgatcgatcgaacacaacgtagatttggatatgtgtactgccgttgtgcatgaagtgcttctttatatatagatatggctaaagcttgccggccggccatgacatcatggccacgcagggtttcctgttctggtgtagcggcagccggcatgaaactaactctcctgtatatgtaaagatggtttgtggtgtaagctagaatgggtttcatgaaaccaatcctgcagattaggctatgtagagaatgcgaggccgttagctggaggaagacgaaagtatgttccaatgtcccatgctcgaacgtataaatagctctcgtataggacggttctgttctggtataaattaacgtcatacaaccggactattgcactttaacttatcaggggtcaggctgtgacctaaggttctggttcaactcaacttgaacccatagaacaacaaaatagaagaacgctgtactcctacttatgcaaagagaaactctgagaacctctatgccatgaaggtactcccaacacaacttcaatttgtaccataaaaaagcgagcaacctggcgttcaatggcctgcatacaaaattttggccccagcggattgtatatggattgtatatgttcgttttgttttttcatcaatgtatttatgcccatgcaatcatcactttatatactcatgtatagctagtgctacagcagttactttgcagtctcccccaaatgttgccaacattgactaaactccaactctacatcagttctgggtgagcaaaggataatctgaaattctaaatagacaatcacaaataactattggcatcctggatgtctaaaaaggaaacgtatcgtatgcacacaagtcgtcttttcttgtacacaccaactaacaaatatcgtaaaaaattctttaaaaataatgtacctttagtaatattccatctacacataaaatccaatctttaaacttttggtgaaactttttagttaatgtgcgtagtatgtacacaaaaaacttgtatgcataagatatagtaacatctaaacagaaccacacgggcttcaaagagcaaaactggacaagagagcaagctgcagtcgtagcttgcagctctcataacctctttcaatacaatatatcagtacaagccccaaggcttgctttgcttacagaatcccatggaaagatacatatcaatcagaatgagaaccactgaacctggccaatctggtggtgactagcataaagctctcgaactcgaaggagcttctattgggtgtacagagattgattgtaggcacagaataacgggagcaataatccacgaaattaactacaatatagattttgctcgatgactgatttataccactccactggcactacaggtatttcatcgatcagaccatgcaaattctctttaaataaccccgtcacctccagctgccacagcaaggaaaaatctgacttcctgattaattctgatttgttggctgacatgagctgcaacgtcctgaagattcatgcgaaatgttaataaattttcaagtaaaaatgctctaataagacaggcaacaccacaacagtacattgcaccacaattagtttaccattatacgagcaaaaactcaccaaaaagtttctacaaaggtacatccattgctacgcccacggtaccaactatgtcacaactagcaagcacgataggtgaaacagcaactgaatgatttgcccgttctcctcaagtatgatgctttcttggttgctctcactccacattgatcttcactcacagaaactgcactacgcatgtcttgcgctttcttttgagcagtgcgtagtttgcccaagattctatccatcgatgatgacctcttcttttcaagcttcatctgaaagtacagaaggcagaacatgtaaccacaacttattacattaaaaagacttaattccatataatcaaagaaaaagtaaaccttcaggaaaatcaattatacaagcatgcatttttatggtacagaagtacaaaagactacctctaactttcgaattgctgcctctgcttttgctttctgcagattttcccaagcagtgatcttcgcttcctccctcttgcaccttgacagaaataaagtctcagcaatagaacaagtcacagtttgtggccttaattagtaagtcaatattacatactaagcactgcaaaattttctctctttttttttgctctgtatttaaattatgacactattgactttatctgctcaaactttttaaactttgaccatcaatagaactcaaaatatttagtatgaaaacataaaaatcatatgggtagatttttcattaataagtacttttataatattataatcttgttagatattaccattatattctaatagaaaattaatgatcaaagttgcacaccaaagaccaaataaagtcaacagtatcatatatttaaatacggaggtagtactattatctgtccggagttctggtattcacgaagggtaaagaaagaagtaggggaaacatatttttcttctgttcaaagggaaaaacaggcacaaggtttaggttgcataactgaatactaaaaagtagggactgagaaaatttatagataaaaaaaaggctaaatttacatatgactaagtggatatctcatccatacaacattggttcttgattatattagtatggttttgtcttttattcatttttttctgccacctagctagttagaccgtataaaaaaaaataaccatttcacagtctagtcccttatattataaattggaatgctgtgaaaataactttataaaagaacctgtggcttactggcttgtgatcctatggcatcttgaaatagatttgcgcattaaaatcaaatttgttgcatagtatttgtttcttaagaaggaaaatgagtaaatatttaatttgccacttattggcagaccatataagagtcaaatcgaattccgcttgcctatgtatatgtacaagcatacaaccaaatcagcttcagcaggagacctggagtgtggcatagacttctctttcaggtttcaacaaaaagaacataagactttcaaaattcaaaccaacagagaagtatagtcactatggcactgacagtaggttggcagtataggattatgagttacaatatgaagtacatgactgtatgctggtctctaggcataaatcaaatttacaaataaaaaaaatgataaacatggggaaaatatcttactttgatacgcagctttctctttctttttcatcaaaagatggagctcgagtctcaattgttttcttcctccactcgacaatatttgttgaccgcctatcagaccctcgtgttacatgtcgcttggaccaccgggtcacagttacttgatcatctacctggacatctcggacttcaggtttaagtgcattactatttggttctttaataggatgtcctgatggtaaactggaacatgaatgtcttgcttttggagaagacgatatactgtcatcaggactcatttgtgtggcaacatctttctttattattggactggaaatggcaggagtttctcctcgcaggccttgcaatttatcatctgtgcgcagggtacaaatttgttaagaaatttaattagcatatatgaagatacatctgaaggttgttgaattaactgtggaaaatccccaatacataaaaatgccataacatttttattttggttgacaaaaatctaattatatccatttcattgttaagcaagatggaaataacataatcctgatgtacactatctgatggcatacatggttatggaaagtcttttataatgtccatctaaacgacacaactagccttctgaagacagaagatcacagaacacatcagacacttgaaaggccttagaactggaaaaaacaagatgttacaagccgattcaaatgttcccaaacaatctaccagtccacatgtcaaagaattaaatgttcaagtgcatatgcatcaggtgtttttgcatgcttagaaatgtgaacaggtaagatcagtctaaacagaatggatgctcggatttgagtgccaaggggttgtatgattgaaatctccacctttgtgctacactgtattgattgaagaactttagatgcattaacaggtagtagtatgacgttatgcatgtgagcatctttcttattatagtatctcactgcaaaaatgacaggatatgcaaatagcataatgtcatgcatgctcactaaccactacaaactaaagtggaaagttcaatttgatgataccaaaacatatcacaaacgccatgcactcttttggcctatcccaacatcaacagaaagttggaaagtcgcgtattcgaagcttgtgataacaggcaagctgttacttgaattatgagtccacgctggacaagtgacacaagctgcaaaacttatatcaagcgtcctcatgaaatcttatgcaaaataacaaatgtgcagactgcagtagcaacagaatcagaacgcatgacaagataccaacaaataaatgataacaatggagaagggactgccgtaatcaaaccttgtgcagtttcttctgagatattagcaaaggcggatgcttccataagtgtctctgtccacgcatgtatacttgctgatctcaagatatatgggtccttctctgcagagtaagatcggctactgccatcatccccacttctacctcttccactgctgaagtcaccattgcgcacgtgctctggcatgagaaccccagcagaaaaaggagaatgtgctgcaaaattagccgctgccagaacaccatcaaagcagggcacaaacggcgaagcagccgcataagcacccggtattccgcctgggtggccaagtgggccactctttgacttgggccgtctatggtgaggcgccggggctgacatccttccaatcccatcacaggaaactggacttaggatccacttctctgcatcctcccattttgatggcagcttcctcccattgttgaaaggaagaacaaccccactgcccccatacctcctattggtaccacctccaagtggcacccgctctgagctccatcccttagggtactgcatggtgctagcgcaatgccggtggtagtttggggtaccggggctcgggaatgtgcctgatctgctccgtgatgacgctgtggagctcttgctcattcctccaacattacccccaaccaagcacctcggcgagagcaccagcagttctatgctcccaccacctccgccggtgagctcatgcttggccggtgaaagcagcaacgcagccccctccgctctgagcttccgctgcttctggcactctaccaaccaacagattccaaaccgaagtcagcaatcacactcaacagagcacaaaagcagcaaccgtactacaagggaagattaatcacctctcagcgagtgggagaaggagtcactgaccgcttccccctcctcctcctccgagcccgcgtcgccgtcgcctctccactcctcctcctcctcttcctcctcacctgcgtgtggaagaggttagctggcgacaaatgtgcgggcactgggataacacagcacacaccaagccgatcgcccgcccaccaacctcgcggtgccgtgccacgcgaggcgtggctgccgatgccgatgccgtgcacgcgcagcggcgagggcgctggatctggatcggtcgcgccgcgaggccccaccgccggctgcagaaaccgccaagagagggcaatcgcctcagcaatcaggagaaatcaaaaccaccgaacaccactgcacagtcgccgcactagtcacacactcacactaccccaagcagcagagacgaattcgaaacagcgagcgatccgtaagccggcgaatcgcaccaaaatagcaatgatagaaaagcgacgaagcagtcagatgcggcgcttttgcctagctttgttcaaattcgcccgccctctttctcctttttggctttatcttttgcttgggcgggatggtttcgccactaacctcggatccgccatgtgagcggcgcgcgtggctggattggatctattgacttctaccgcgcccgcccgccccttgcactaaaatactcgcgatgcgcgtgccgcagccatccctaacacgacaatgcggcggaggaaggggaaggttaagagcgggatatgtttattactgctgcggccgccgccggtcgccttcgccgctgcggcggcggcttcttccgtcgtgcgggatggtggcgtcggtcggccgcggcggcggcggaggcggagtcggggaaccctagcccgggctcgaggcgtcgcatgctcgagcgcgcggtcgcattccccgatgaagcagagggggtggtggcagtggagtgggggaactgggaaggagcagccgaggtgtggacgcggctgccgacgagtgcggcaaggtttcaaccgggcgcgagggggcatttcacactcacacatgggttcctcgctctcgctgccaggtgggcccgtcccccgcaccgctcgcttccagtacagacatggaaggtgggacccacgggcccggggttttgacttggcgcgaatctttctgtcggggtggtagagggagtagtactattcctttgcttcgtttaaaacccagccgcgaacacgtggacaccgtccgcgtcgtggaccccgcgtgtcagcggcggatcacgtggcgtgtcaggcggagccgggtgcgtcggaaaggtggtgggtcccgctcgatacactgcgacagtgtgtgggccccccatcgaggtgagactgtgaggtcgggtgatgatactgccgtgacagtaccagtgccatgcttgccagggcaggtgccccagacgcgtgcagtaataaacggcgctttgctttgctttctccacttctccgtggcgtctttcaggcccagcgtaaaggattcctgctccgagcgatttttttttgtttcaaatggtgtaattctagcatctcttattgatttacaggtcaggttagtacaatctgggttgttcagctgcagtagaaggataatacattcttgatttaccgctccagctaatacagtactactgcccctgccactattttactgctaggcgcgtgctgtgggctgtggcatgatcatggtcagctagtactcctactgaaaaaggttcacggagagagaggcgttaaacagtctagggaattggtggaatcatgacacttgtgctccccctgctcctctctcgagtgacatactacaacagtggcactatgctatccagcacggttggccggtgatgcttttaaggagaaatcaagtcacgcagtaagagcaggtacaataacgctgttagccaactataaacacattttaataagagcaggtataaagcctgcttatctaatattttaacatatatgataaagagagggaaagcagagagaacaaagcggacgacaattcagtcgccggctcaagcacgagcgcctaggggctctgccactgccgctcgggataaccaatcgaaaattagaacttgaacattcagaagttaccaacacctgacaggatgcgttggttaaagcatgggtgtagccaattgctgtatctaccgttgtttagttatctcttaaataatgtggtgaattttggagccggcagttaactctctctactattgaacttgctctaagataaacgatgagagagagaagcagcgggctacagatctgtagccagctgcagcacggattctaagatacactatgtgtatgacatgtgggatcatatattaatagtatagtaagcaactattgtatgaattggctattagattggttataaatgaattggagctggtagtattctgtactgttagacttgctctaatgcggtgacccaacaatcgtgtagcaggggcatcgatcggcatcagcatccgtacgagtttgcaatcaagtcatcaacacgcctggttctccgtcagcgtcaacggacgtcttctgctcttcatgacgaacagttctttccggtatacgatgtgcgtacatcagctgcaatttggcacggctctgggttgcgaaagcaaagcttcgcgcttttgtagtagggccgattggtacacatgattgcgctggatcatcacggaccagcctgtccgttgtacgctcgtagtcgtataataaactcaacagatcacggacgaaccgctcgtgatagtcggacgtccagagagtgatcgatgatcatacatggcaaagaaagtttactgatacaatcacggagtgtttatgttcgtcttcttctccacaatgcacaatctcgactccgcccttatcattggggtgaatccactagagataggccgccgcaagtgagatatcatattgtaagttttcttttagatgattgcagggaaacatcacgaagtcatggctttcactcgcaatttgttcgtgttatgcttaccgatcaagattagctgattactcaataaatacacacacccaagattcagcctgaccaagaatcacggtactacttattcaccgccctgctaccgttgttggcctccatggctacccgcacgtgccctccacgtcgaccggctccgcctcttccccaggttcgttgcagcgaacacgctgtaaattttgatatattaggttattcctaactcaaaacactacacatagtttccataaactctacatcattaaaaaactggtactagacactactattccaatacaaacatcactatatatatttaaatttaatgctatttatctcatatgatgtcttggatgttgtgtagaaaccaagtctcatataagacaaggtttccttctcttttctcatgtattcactttccacatcatttttcatcctaggtgacagttttatttaatgttacggataccatcctagtcattgggttggaaatgacctacttattatagttggatttgcggctttggaaactttctagcttcactaccgatcggttagatgcgtagtcgtcgggatgtagacgggctcatggaatgacggggtggagcactggttcgaccctggcacggcatgcaagaaatgccacagctagtggagggtggagcgctggtccgccaccggcgagtggcgtgcaagaaacacaacagtgggattgggggagaaagaacgaaggggaaaagggtaatctcatgcactccttaaattttccaaagctgtctcaaacgtcaaataaaaaaagatggagacaatatatttttttattctaatatcacataagcgtcacgtgagacaaaaactaaatcaacaccatcacgtaggcattacgtcagcaaacctccgatgatttaaattgtaccggttttagtagttgagggatcgagatatccgatattacgattttgaagactggttcactagttttaaggtaatcaaagtggacttatttcctccaaataaaatctgccacatgggcctcctttaagtgtctaaaggttagatgggccgagcggttctcccttctgggcctaaccggtaattctctctttctctctctacaaattgggcccgaaacgctgaaccgttagcccgcacgacaactctaggtcagccacgaatcgtttcacctcacttcccaccacctctcgccgcttcgggcatcgtctctcccagcgccggccggaccgatggcggcggagccagcagcggccgaagccatggatgtcgaggcgccggcgcgaccaaccaccaccaccagcactgtatccacctcgaagggcaagtccccccacgacctcctcgcggagacccgcgcctccgtggaggaggtcgccgcccggatcctcgccatcaagaaggacgacgcccccagaaccgagctccgggagctcgtcgcccagatgtccctcctcctcatcacgcttcgccaggtccgtgccgctcccgaatccgcaacgcctcttcgccgggaacccctcgcgttagatctgctgtttgctcactcgagggtttggatttgcgcaggcgaacagggagatactgatggaggaggacagggtgaaggcggagacggaggcggcgaaggcgcccgtggactccacgacgctgcagctgcacaaccttctgtacgagaagaaccactacgtgaaggccattagggcgtgcctcgacttccagaccaagtacccgggcatagagctcgtgccgacggaggagttccaccgcgccgcgccggcggacatccgcgataagacgctcgctgctgacgcgtcccacgacctcatgctcaagcgcctcaatttcgagctagtccaggttgtgtaccgtgatcagttgattcagttcctacacaaataggagatttacttgtcatgggataaattcttgtgctttgttcattgttcgtctaaatgattaaagcatcatagagagtgtacaggattgtatgagcatttagattgggggtttgttctgaaggatcagggtaataatcgaaagaaagaatcacatcgtagctgggttgacctgctagtaaatttaacgtaaatatttagcttggcttgcaggattggttctccaaaaattcaaatgtatatatagaaaatgttttataaattcaccgttatttttgtagtttagagtgctcatatatcaaactgttcttaagtagaacgctttgttgttatggaaactctttttatgtatattgattttagtcagttgcataattcttcttaaatctgataattctttgtgtgactagtgatcaaggtttgtagtatgtttttggatatgatttgatctgcttaatttgtttatcacctctagttgtttgaatatgtgtttgcttgctaggacaaaagtcccttactccctttgtgctagtgtggtcttgatttgtttgggtcccaatatttgttctgatatctaaagtaagtttgaaatctgaaacagcggaaagagctatgcaagctacatgagaaattggagcagcggaagagcagtttgttggacacaattgcaaatcagaaaaagttcctttcgagcctcccaacccatttgaaatcactgaagaaagcatcattgccagtgcagcagcagctggggatgcaacataccaagaaactaaagcagcatcatgcagctgaactgcttccaactcctctatatatagtttacacgcagtttttaggacagaaagaagcattcggagagaatattgaagtggagatcactggaagcacaaaggatgctcagatgtttgctcaacagcaagctaagcaggaaaatggttggttcatataatcatatctcattggaatatagtttatttgatttcctattacagaagtgcaatactcgcaataattaatgacatttattctatctcttctcatgtaccgtatgatatgtaagggatcctttttactacttttagaaaagcaatgtagcgtagccacatattaaatgaccagatgcaatttcctagtagatacttgtgtctagcataaacagttcgttctcatatagcagtatagaagccccggtcttttatggaagctgttatattttagttcctcattacaaattgaagctgcatgtaaataatgcatgcttgcttcaatacttgtataatggttagaatcagattgctaatggttctcttccacttgttataatctgtaaaggtggtagactaggaaatatttctgataaagcgtgtcttttgtatctgcaatagctggcactttgtcaaatggtgataatagagtggatgacgatgcaattgatgatgaagaagatgctcaaagaagaaggtcaaggtcaagaaaaagtgttgtgaaggaagctagtaattcagtagtggcatatcaacttcatccccttaaagttattctccatgtatacgacactgaagagtctggagcaaagcgtcgtaagctcatggtcctgagattcgactacttggcaaagttgaacgttgtttgtgttggaattgaagattcaaaggggctggaccatgatatcctatgcaacttatttccagatgacactggtttagagttgcctcatcaggttggaatcagctgattttgactattgctagctgaatgcccttgcattttaatggaattaaaagaaaaaaaatcatatcattaccatttcaaatattaatccaagaattcatattgctgttggaatttgatatcttccccttaaatactttgtataaaattctcttattattgttttgatacctaacacagtatacctacttgttcatatcactatttgatggtcccacatgtcaggagatatcatagtggtaggttaaggcagattcaccattcaccaccaccacttgagtttttttaaaggaatatatatacaaatcattctgtgacaatctctagttgataggtcattttggtttccttatatttgtggccataggcagcagtgagctatcatggctttatctcatgttggtagccaaatgtttttggttagttctctgttatattatcttaaagagagtcgttttatcaattttatgcagatggctaaactttatgctggggaggttccgaacttcagtgaaaaggattcaaggccatacaagtgggcacaacatctagctggtatagatttcttgccagaagtgcctctatctgttggtgatgattctaacagagcatcgagaagtgcggacttgtcatctgggcttgctttataccgtcagcagaatcgtgcacagactattttgcagagaatccgctcacggaaggttgcacagatggctcttacgtgagtcactgcttcacaatcttgtagtttgggatgtaacaaaatttggatggtagatccttatagatggaggaaatgtactttggctgatgagtttttgcttcattgcacatgtcattctgtgacgtgctacattattagttgatgaaaaatatttgatgagcaaagtttgtgaacatctcgtctcctttttcttatgagtactatgcatttcctttgtgattagtagcatcttgtatcttttacttatgacctcttatatgtttttgagttatttgattacaggtggcagcttgattatttaactaagctgaagtggcctcaaattgaacacgagaatgcaccatgggcatcacgtaccccattgtgtagtctgcatagctggtcatttactgggatatttcctgagccagcacctcgttctcctttgatggttgttggggctgcaggaagtgttgacagtgatatggagcgaagatctgtgacgcattgggaagaaactgagagtaccagggaggatggggagcttctggccgtggttcctgctgaaaacacgccaagtgtttctaaaatatcacactctgaagtgtcaccggaggttcgaaaccattctagaggcttatccctgatatcaaagagcgccacaccatctaaactaagcatctcacacagttttggtagaaatgaggacgatcttgatctcttgatgtatagtgacagtgagttagaggaacagacatttgttgaccaagaagtggaaaaagtcaaccttgctacagacaaatcctgggaggactatgcttccagggagtttaccctggtcttgagtaaaactctgaagaatggtccaaaagtaatgctggaagccaaggtaaattcttcagttactcttttggtgtgagccttccttaaagtatgtccatgcacaatactttctcactgtggatttttcattgcagattgcgatcagcatggaatatcctgttaggccaccttttttcacattgcaattgctttcgggaaagactgaagctttaaaatggcacaatgatcttagagcaatggaagctgaggtttgtactgctaactgctctcactttaatgtatttctcagtgaagcttcactgcttatgctggctacacttatgatgcaggtgaatcttcacatccttcaggttgtaccttcgtcatatgaggactacatacttactcaccaaattctgtgcctggctatgttatttgatatgcattttgatgaggatcatggtaaaagaaaggttacttcagtgattgatgtgggtctatgtaaaccagttagtggaaccatgcttaccagatcagtcaggggaagagaccgcagacagactatttattggcgcagcgctgattgttcttctagttgtttatagagtatgcataatgctggccctactgaatcaagcatctcgtctcattttgaggaaattggatgctgacagtgacagtctttcattccttcccgccacggagaaagttgcctaacatggattcatggttattcctactggcttgacatagatgatgagctttttccttttcttttgtttgctggagagatgcttcgctgttgtgatactgatgagattatctaactaccctgactgtagccaatggagtgttgtcgggcttgtgtatgaggattttttttttttttgggtgggggtgggtaagagccaatgcaagatatccacttttttcacggtcatcatcagaagatatgtaaccgtacaacattctaaaactcttgttgcatcctgtattcttccagcacgttttgggaagccttcagcattaagcaaaagaacagcttgcaccaagtatagcttgcgtgccaagggtgatcagacttgtatgtgacttgagtcatctgatgtttcatcacttgggtgacatctgtgaggtaatgcattgctcgtcctgagtcctgacccatggattgactgatgttagccatgctatcttggaaacattgttgtatgccaaccggaccgattttcatcatattattgtgtttaagccatgaatttacatcgaatctacactgtcttgttcaagaattctgaaaatgaatgctgcattccactttatgaatcatattattgtgtttaaggcatgaatttacactgtggatgttgcattccacttcatgaatcatgaatcacaagcctgttactagtttactactaaatgtgttggcgccgacgccgacgagctacctatcggagcggctcgagcgaggcggcgccgagcctggtggcgttcacgtagtcctgcggcgcgtgcggcggcaggcccggcagcagcagcccggcggccctggcgatcctcatcagccaaccctcaccgtactccggcccgtcgacatagccgatgacgaagctccgggcgagctcccacgccgcgttcgcgtacttgggcaccaccgtcagcagcgagaagtagttcttgttcggctcctcctccgtcacctgcatcgccacaacaccaatcctcgtcagtcaccaagttcagttggaacacagttgtgggctacaactagcacatgctgcatctgccaattggcacagtttgcagcatcatcctcttctctccatcccacaccaaagtgggctccagttccaggctttcagcaagcaaggcaaggatgctgcccatgacgagaaaagaagcttctcactttctattgttcttaacaccaaattcttgcttgcaagccatgcttgcttgccttgaaaacatgaccgtgtgtatattggtcactggacccctttccaagctctttcaggggattggattagatgccaagaaacaacccaatctaatgcaatctgtcaacaggccggccctacactactaacaacgtactcgctcaattaataaaaaaacaacctatgcgacatattctaatactacaaatctaaacagacacatattcaaatatattatattaggatgtattatatctgatactaagttggtttttataagatctaaacatatatctatctagatttataatactagaatgtgtcacatctcatattagatccgtagtactataggtagaaagactagagttggacactgacatggcctttgtagaagctgtcgaagtagaggcacgtcccaaagtgcttgaacagaagggccgtgtcgtcgtagggcaccctgggcacgatgtcgttgcagtacacgaacctgaagtaccggctcaccggcgtcgccaggtgcccgtccatgaaccggcagagcccctcgtcgccgacgcgcggctgcccgaacgtgtacacgccgtggagcctcgccagcatgtcctcctcgccgtgcagcgccagcacggtcgggaagaggatggcgagcgcgccgccgaggctgtgcccggcgaccacgaaccgggcgcgcgggttctccgccaggaacgccctgagccgctcgcggatgacgtagtaggcgaacggcttcttgtcgctgccgccgtcgtctccggcgccggtgggttgctccggccagccgccgttcctctgcaggcccagcgccttcatgaagccgccgtggaccttgccgacgccggggatctcgtaccacgagaagtccacgtcggcgcaccactgctccgtgtcgaacggcttcgtgccgcagaacgccaccacggcgaggctcgcgtcctccgccttgtccgacaccatgaacgcctgggtcgtgtagtcctcctggaattctgcacaaaaaatggaacaaattaagcgagttggtgaaaatggcatatgcaactcacaatgtgcacgaatttactactccctccgtttcgtaaagttgtttgactctttttctaattaaattttgttaagtttgactaaatttatagaaaaatttcgcaacatctaaactattaaattagtttcattaaattgaacattgaatatattttgataatatgtttgttttgtgttgaaaataatactgtattttctataaatttggtcatacctaaaaaaagtttgactagaaaaaaaatcaaacgacattataatgttttccaaaaagttgtatttttaccattccagcagttgtagaagcccacgaaattcatctgcagaagaaacagactcgtgaggagaggttaaaaatgtgacggcgatttcaagatttgggactatgcagagtttgaacgaattttcactgacctgccagtggttctgaacaacagttctgacgacgagttcgttctcgtaggctagttttgcagccatgatcgacagggcagcgtggtagtttctatcctctggtttgatcttctcgtcaagatcgattcttgtgtcaagcaatccaatgcatgatcggtaattgatggatgatttgtctggcattttcacctttcctgcagaagtgcagagatagcaattatcatctttttttttcttcttcgcttatatcattacttcattatacctcgatgaacagaggatgcaatgaagaacatattttaagtagctagtctacgagaaatcttcaactgttgaaatagaaaatgatagggcaaaaacgacaaaaaaaaacaaaaaactagcgcttatttttttgcatatctaattagagaagcgcaatcaattaagcagcccagaaacacggaatatgataaatttgcttagaaaaaactgaaaaacagccttaaatatcgagtctcccttgctttgtaacattgaacactagctaggagtagaaatcaggatggaagttagctgctagctgtatactgctacgttgtaatacgaggaaatgttcttgtctgtgatgcagagcaaactcaagatcggagcacgcacgaacgtgaaagcgaaataatcataaatgcaaatctacgaggccgtgataaatgtaactgacagctgtatttgtacgaggagcaagtttttcttgcaagtttaactgcagaagaacatgcaagccaagctagctaggtagctagttaacctgtacagagttaaaatctgtaccttgcagagcgttggtgatgagcatgaagacgctgccgccattctcgttgaggaggttcatccagtactccgtcccgccgccgagcagcgccatcggcttcttcgtccacagcagcagcatctgcgccaccagcgacacgaacagcgcccaccgccgccgacgctcggcgatctccgtgccgatggggcagtccacggcggcgttctccgccaccttgcacgaccacagcaggtggaacaggtcgccgatgccgcccttgtccggccgcagcaccatgaagtcgccgccgaagccgccgccgccgccgccgccgccgccgtattctccagctccggccatttttgatgcttacgaccaaagccaagaaaaccgcgagcttcgaatcttcgttggtgttggcttagctagcgtcgacacagctcgttgctcttcccgtacgtcgaagcacagcgatgtttatatagaagtggtcatgcaatgcaattaggtagaggcatataagcgcaattagcagctgacctagccgtgtcaactctgccaattagcgtatgagattagtgcaaagcttggatgagtttaattaaccagttcaaagtgatcagtccgatcaacgatgatatataaaaccgtgttcatgtccacgcgagtacacacacacacaatatctttttcagccaagtcagactcttgtttttgcgtacatttgtaagatgcgatatttgaaatcctgaggcatttcacaatttcgtaacagtttatttggtggtttttgctgtgcgtgcatggtatgcgacgtgcatcttaagtttctttcttgcaatatttctcagcataaaggggattggccagtcacagttctcacggagaagcgtagatgtactgatctctagctagtgcgcctgtcatgcgtgcaacgatagcgacctagccaacagttcatcattaactacagatttatctgacaattaacaatgcgattcctttgtcataaccttgctactagtactagtataggcattgttcagctggcggcaaaaaaagtttgtgtacatttcgtcagcagtagacataggtattatcgatcgagatggggtatcatttggctggaaaacgagtcctgaaagaatgattcaatagaagcaattaagagagtgacatggcaatttcatccttggaagctatcaccatatccgtaacaagccaccccagttgctgcagctcgattattgcttgatgcgttccttcaccccccaccatctcggtcagaaactagctatgcaatatgcatcaccggctgttacgtgaggctcacgaagcattggagtgatctcccaactaacgaggcatcaatggctggctagctacttctcttccatttccatttcttcttggtcttggcgttcgattcgatccccgccgggctcctcaagcaaacaaatttggtggaaaacaccgcgtgatactcctaagaatttgtccttaatttcctactgtttttacttaaaaaaatggtgtgatgtttttgttcatagttaaattgctacacgtgtgcagtattttttagaaacacggtacaattgtaagcgttcataatacgcagactcatcccgcctaaacacacacgcacaccctacccctatgagcacgtttagaagattatgccgatatatcttaaaatcgacgaagtcaccatgaatatctcactaaaaaaataattagtcataaatgagtactgtgttaagtttaaaacttgtatcaaggtgggttggtttcaccacaagaaacctaaccagttgtgcactcgtgctacactcacttcaactacgtgtgtgctgtttgatacagtggatgtggatccacatggaaattatggtccaaacagaaacaggtgtatgtcactttgtgtgtatatctcgcaaattcagacgaaatggatgaaccattttggatcttactctccactgaaaaagcactagacatcattagtaaatggaaaataagtagataaccacgtctccaaaaatagaccggcaatgtagtagcatcgagtctttggtcttcctggacgtcgcttacaagataacgacgtaaagcgtcgcttacaagaagaatacgccttagtaacaacttctactagcaaatatgcaaagaagcagctcaggaaaaatctcaattcttcagtgatctggccattagtcatagtaaaatcagggcgaagccaggatagatggtcaccggggtcactattaattaacgatcctaacaattggctatagcttctaataattttaagtctattgttgtagtagtagttaccttttacatatcagggggtgtttagatctaggggtgtaaagttttagcgtgtcacatcggatattatatagggtatcacatggggtgatcgggcactaataaaaaaaactaattatataatccgtcagtaaacagcgagacgaatttattaagcctaattaatctgtcattagaaagtgtctaccgtagcacgacattatcaaatcatggagcaattaggcttaaaagattcgtcttacaaattagtcgcaatatgtgcaattagctaattttttagcctatatttaatacttcatgcaggtgttaaacgttcgatgtgatatggcgtaaattttttgtgtgggaactaaacagggcctcaattacaaccacatcattattgtactaggttacactatttgggaaaagaatataacaacctcttatatggtgaaaatcacctttgttatattcctgttaatagtgaaatttggtaattggcaaagacgtcatcggcttagaatcattatcggctgtagcatctcggaatcagtcgatgggagttatcaagtcgccaatagtcggattcctgctatattcggttaaggaaatcaatctactaaaggaagcttattcctaagtgaccgagtttaaagaggatgcggcatgacagtttatctattaattaggaatagtttgttagtttccttttatctttaggaaagtgtgtttagtgtccgataaggactttatattttccttttatctttaggttagtttctttcttgtctgacaaggacttgtatcaacccatgggtataaatatgtacacccggggtctatgtaatatatcctcacgatcaatacaattcggcgcatcgccaccttttaccttttctactttattttatcgtccggcgggacttggcacctgacgcagggctgcatcggtgttcgatctccggcgaaggggtaagtccaatgttccgttggcccaggcaattgtctcatctacgtcggcgtcgttcaaggctgcatcaggacattcgacctcttggattactctggtttagataatatatttgcttggctatttatcatatgtctatgttaatctagtcctagcatctcaatttagttctatcggctatctctcgctttagggtttctgccagtatcggttaaatcgccttactagattagattagcctaggcatctaccaccctgaaaatcagtcaacggcttaattgtctagatattgtgtttcttttcatacttagtgctacatcagttaagtttgatctactaagtcgtgcttagaaccataatttctagtctgcttcttgattgccaataagggtttcatcggggtttcagccgatgagttatctggacgttgcatcggcttacaaggactgcatacatattggatttagccgatcgcaataagatttaatttttaaatataatcttgtggattttatgacatcggacctccagccgatgtatgctttaactttcggatcgatgcttatttatcatatcattgctagccgattggtttatattggattgtattgttattttattacatcatcatcagccgtttgcctttatatcattatctacattggacatatagccgattgcttaaaccctatcgctatcggctggtatcggcatcggctattatcggctatcggctggaactactccataggcttgtcagccgatcggctgttttgatctaccatttacatatcttgtcagttgtaggatcaaactgactggcacgcccgcacctcattaatttttggacctgcacaggagctaagcagatctcccaggccggtgtgttcgattttttcgtcaacaattcccccaggctcatgcatcatgatcatgtaactgaacttgaaaaatcagacgtttatatttcaaaactctaatttcctcaaattcagacttgagagactaggttcaaccaaattgtgatgataatcaagaaataataataggattagttggctactggagcaattaatcctaaataagggccactttatgagcgccagtctaaaatgtatatgtatatctatgtagactgatatataatcacaattgctaactaattttctatttgctagctgataatggtatcgttccttgccaccagttgagctttaacgaaacaatcaccagggtctagtgttttctttgaccggggtcatagctgtaaaataaaaaggagtataagggactcagaagaaatcatcggggtctactgaccccaataacttgctatagcttcgcccctgactgtacaagcatctttattatgttaatgatggtgtaatctggtcagtaaaagcgattctgtgaattttgcctgctccagagtatgccaagtcaatgctaatctggcctgtacgtatcagataaccaggacacctctgcttgtccagtttggtcactgaaaccgtctgcgtcaagaacctaactttggtatgacatgtcgatccaattcggagttaacacagtaagtaaatagtaacatgtatgtacaattataaacgtgatcttttcttcacgagactacgagagacgaagacgatggcatattggaatgtccattctgccgcctgccgccgtggaatctgatgtccatggggccagggattgccagatttggatcgctaccgcctaccagtggttgcgacccatattggggtgggccgaaatggctgaacgttctgatacgggcctttcctcgatccaaaacgcgaagactatgggcctgaaaaggtccataacaactcgatgtgggcctccggtgctcaaggaaacggcccagcggtaacgaaatcagaggccattagttgttgggcctcaaagacctactgagaaaagaagcctactacactatctccagcctccagctctccttccgtcccttccgtctccgatggctgccgtcggagtcatcaactcgtcagatccctgactccatcttagagcaatgcaaatccactgttatactgcacctgcagtacgtgtcactgacatatgggtcccacctattccgggcccacatgtcaatggcacttactgcacatgcattacaggagaggatcccaactcaagtttaatagtatagcccactactagctccaattcatctatagccgatctaatagccaattcatacaatagttgcttactatattattaatatatggtctcacctgtcatacacacattgcgtcttgaagtccgtgctgcagctggctacagatctgtagcccgctgctcttctctctcatattttatcttattaaaaatatgtttatagctggtaaatagtctgctattgtacctgctcttagaaagcattgagttaggccatgtggactcatgatgctggaccccatttgtcagggtccctcaggagttgcgtcccctatagatctacggttgcctcatcatcctaggacctgccatggcgccccttcgacctcaccagtggcaagggaggaagggattgaaattattgccagattgtacttgtacaagatacaagaatttagtaggtagacgcattttaatgtaagaatttgaaaattgggcaaactggtacactaacgtccgaggcaagctaaaaaactgtaaatttgccaatcagaagactaccagacaatcgatttacttgatcattagcttcaaaaacagaatcgagacacatttggctctaatttagatgattctttttttggcaagactataatataatgcgttgacatattgaaatcacatagataattaaaagctcttgattttctacgacaatatttgaagaaactatggatcgggcgcccaaattttctccgacaaaatcggacgccctcctcttctccaatggatgcttgatgcctgtcttgtcgcatgcatgtttcctttgcctctgcatgcttatattttcaattaaaaaaaatctatagtgctatagctctcttcctccatgctctctccaagtaacttttcaactaaaccatttctctcttaaattacttatccaatttaaaatctaattacactattatatttattgcaactgaatctctggaacagaatctcaagtgattatattttagattaaaaatttatgattatactcctaattaaaacatatcatacatgcgacatggaattgtaaatgctgaaacataacgaaatgcatgctgaaacattcaaagaacactacatgcaatatgtgcaaatgaactagtgtcgctgaaacactctaagaacattacgtgcaacatttgcaaacaaactagtgaaacatctcaataactattatgcaacattaagcacggatccattgtaatccaaaaacttaaaatgcgcaacatggttgatttacaattgaaacattaacttctttcatgtgaaagtgaaacctcatatctaaacatggttgatttacaattgaaacattaacttctttcatgtgaaagtgaaacctcatatctaaacagttgaaacatgtatatttttatcatcagaatatagtcatgtcatattttgttataaaaatatagttacagtgactatatcatattatagatcgaataaataatttgaaagaaaaacataaaactagttatatgcataagagagactggagagagagaaagaagggaatcatgcagggagagaaggcggtgatcgacaaatcatttgatggtggttgtaggccggtggaatgaatcgtccgattttatcaccatcaagcgacccattctccgtcaactttcgggtgtactgttcaagagatggaaaaacattactccatgctcccatcgcatcaaatggcctacatgccggtgtcggcatggaaggcaattcagaaagagtttgtttaaaatctgaatttagatgctccgaaggtgattacgaatcagaaagcagcagattagcaatcagagcaacttaactagcatcacattgagcagcgtccacatccagcaatagcactcttggtacttgggtgtcatgggggcgatgtttccatggcccaattacaaatttacatggggagcttattgatcttgcagtgccggtaatctttgaacttcttggccttgtacttggccgggctcccgtcggtgacgagctgcgggtgcggcccgacgacgtgctccggcggcggctcgacgaacaccggccacgacatccgcgtcctgtccttgtccaccgtcgtccgatgcagcaccgccttgtacctcccgttgctcagaatctgtatcgcatcacatggcagctccatgcatgtcaggtgttcgacgcaatgcgcgggaggcgaagatgaggaggaagaagagagcttcgtacctcgatctggtcgccgatgtggatgatgagggcgtcggggacgtacttgacgtcgtaccagtggccatccttgaatacctggaggccctggacgtcgttggggacgaggacggtgaacgtgctcatgtcggtgtgcggcgcgacgccgagggttagctccggctccgggcacggcgggtagaagttgatcttatgcaggaacaccagctcgtcgccgccgaacgcctcccacatggcgccgccatccagtcccagcgccgtcgacaggtgctcgaacagcttccgcgccagccgctgcatgtgcttgcagtactcctcgttcgcctccctgccgcgcccggtcgccattagcttccgcttccggcgcgcatggcgagctatgtatggatggagacgcgtacctgtagccagccggatggctgggccagatgtcgtggttgaccatggccggcggcgcgacgttgtggaagaagaagtcggcccacgccttcttgccctcgaggtccttctgcagcttgctgccgtagccctccatcttgccggaggacgcgtccatggcgtaccgcgccttctcctcctgcggcagcgcgaagaactcgcgcccaacgcgctgcagctccgccaccgccgcggcgggcacgccgtggttcaccacctggaagagcccccactccgccgccgcctccgccacgcgcgcggcggactcgggcgccgccatgtcgatcaccgggatctccggcgcgtcgccgccgcggaacgtggtcgcccccggccgctcgtgctcggaacgcacgaactccggcggcagcgccgccagcgacgacgccagcgcctgcacgctctgcacctccgccattacaacccaacgacgacctctggtggtgctatcttccgagaaggaagcagcaaccgatgtgacaatggcgtctcagcaaacacacgcgtcggcaacgagacaagtggagctgagatttaaaggggcgactgcacttgccggtgatgaaatgatctgatgcacggcgacggggacggcaacgagaggacgagagggagactaggcggaaaacttgcctttttccgtttcgtccttcatttcgcacgcatcgcgcatgcaattcagttgcttgttcagatctcgtaaatagtaccaacgagtaacaatcgacgcaaatggcgtactttcatggcacacgataaactaacaaaggcatacacgtgcatatcccctcctttcttgcatatcaactaaataggtctcgtaaatagtaccaatgagtaccaatcgacgcgaatggcgtatttgcatggcacacgataaacttacaaaggcatacacatgcatatcccctcctttcgtgcatatcaactaaataattataattttttttaaaaaaattataagatatattaatatgtaatatatcactccacaaatgtttatggagtgatacatttcatattaatctgtgatggcaatttttttaaaaaaattttataactatttaaataacatgtatgtaacgagacaacatcttttggagggatgaaaatcccgtcccatatatgttgagttttataatccatttgaaatgagagatgtgggaaagtcaaaacatttacgaactcctttagaattttttgatcactgattcacttggtcaaccatttccaccaaccaggcagttcgatttcatcggcttcaacccaaaaagaaaaaaaaactcacttatccttccatttttcttgagaaaagcagatgggaaaacaggacaaaatttgtatagacctcacgaatgcacaaattaatccctctgtttacaaatcaaccaaaatgatcaatgcaaccgtataatctatctctaacaacacaatcttctcgccggtgtgcgccgccctatcttggaccggagagctgcgacgacgacatgtacgacggccacccgctcatcgtcgtcaccgtcgtcgtccccgaccttgtgtggtccccattggaacccgccatggcttgcttgatgccgccgccgctgccgcccgagccgtcggccggtccggcgaacccccggccgtagagccggaggaacccgagcgactgcacgcgtggctcccacagttccatggtgccctcgagcatgccggccaccatcgccatgctcggccgcagctgcgggtcctcgtggaggcagcagagccccacctttaccaccctctccacctcgccggcgaccaccttcccctccagccgcgggtcggccagcgcggcgtactgccccgcctcgtgcccctccagcgccatgagcgggaagtaatcgctccgggcgccgcgcgacgagctgcccgtcgtcccgttcgaggagttggagtcgtctccggtggcggcgccggcgccgtcgctcacgtgctcgctgcggttcttgcggccgcgcacgagctcgaggagcaccatcccgaagctgtacacgtcggtgcggtcggtgatcgccgtgttggtgagccactccggcgcgaggtacccgcgggtgccgcgcatcgtcgtgaagagccccgactgctccggcgtgaggagcttcgcgagcccgaagtcggcaatcttcacctggccgccgtcggcgaggaggatgttctccggcttgacgtcgcagtggatgatcctctggtcgcagccgaagtggaggtacgcgagccccctcgccgcgccgatcgccacctccatcctctccttccactcgagcggctggccggcggccggccggaacagcgtccggtcgagcgagccgcggttcatgtactcgtacacgagcaggcggcgctggccctcgacgcagaagccgcggaggcggacgaggttgacgtggcggatgttgccgatgacggcgatctccgtgcagaactcgcgcttgccctgcatcccgacgccttcgatcttcttcacggccacggcggagctgtcggggagctcgcctttgtacacggcgccgaacccgccggcgccgatcttgatgcggaagctgttggtcatgtcctcgatctcctcgtgcgtgaaccgggtcgggagtccagggatcacaatgtcgttgccgtcgtcgtcgttgccgtagacaaggtgcgccgagtcggacgccggcgagcggtggcgccggagctgcacgtccctggatcgcgaggcccgcctccccgcgcgccgctcttgcttgcgccacgacacgacgatgacggcgccgacgacgacgacgagcacgaacgcgacgatcgtcggcaggaggatggcgatgagcgtgctgttgttggaagatgaaccgctcggcgaccccggtgactgcgagctctggaccttgatgaaaccgaccatgtcgcctcgcctcgagttggcgttaaccagggagccgatctggtgctgcaccaagaagcaagacaaggacgactcgtcgtagaagtaaccgaggcaggagcagttgccggagcagagtgcttggcacgacgacccgttggagccgaccatgtctggccgtgagaacctattggcgtagtacgcgacaccattgccgagactgatgtacgaggtcggggcggcatcaccaccggcgccgccgcaggaggcgacggtcatcgccttggagccgtcggccggtgtgcagccaccgtcatgcgacgacgcgaacagcggcgggcacgtgcagctggaggcgttcccgttgggcgcgcagaacccgagcgcgccgcaggagagcggcaggtcgcacccgctgttcggcgcgacgaacccagcgtccgtcggcgacggcgacgtggcgttcgccgaagcgtagcttgtgatgaccagcttcccttccacgcccagcttgacgatacgcagcttggcgtccggcaaggggagctggatgaggacggtgtcgtccgcggcgagaaggtacaggccggtgccgttcaccgccatagacgccacggcgccgtcgcgatctctggtggatttgacgtcgatggacaggagccagtacagtgacccgttccatgtcagcgccgcatcggccgccgtcacgtcgagccggtagccgcccaccgtgtagtccgagtccgacacggccgacgccaagaagcccccgacggggagccgctgcggcgacacgagcacgtcggtgggccggtcgaacgactgccagagcgtgcggttcctcccatcgagcagcgcgaggttgccggattcgtcgagccggagcgccgccacgggggacgcgaacgccggcgtcgaccacacgacggtcccgttgggatcctcggcggagatccccctcgccgtgagccgcagcggcgcggcgcggtcggtgatgggcgcgtcgcggttggcgacccagacgcaggtcttggacggcgcgtgcaccacggcgaggtagtaccggtcctgctgccccgccgggttgtacacgacggcctggaacgcgccgccgccgccggactggaggaacacgccgtaggtgtcaatgaacagcaggtacgacgccacgaagtccggcacgaccacctccgtggcgatcttcccggcgcggacggcggcgccgacaaggacggcggcgaggagagggagcagcggatgccgccgcatcgacggtggcgagcacatgggacggcggcgggggaggggtcatctcatgggggaggcgggagcggcaggcggcgtgacgcgatggcattgcgattgcggggtgggtgggtttgtgccgcgagagggggttgactcgggtggcgccattggccgcgctgggatctgcgtgtgcaagagacgaagaaaaaaaataataatgcggcgagacgacgactcgcgagtgcagcgtgcggctagagagttggtgtcgctgccgcctgtttttcaaaaaaaaaatttaagtgtacggatacacatttaaaatattaaacattgactaataataaaataaattacagatttcgtctgtcaactacgagacgaatctattaagcctaattaatttatcattagtaaatgtttactgtagcactacattgttaaatcatggcgtaattaagctcaaaagattcgtctcgcaatttacatgcaaattgtgcaattagttttttttgtctatatctagggctggtttggtttgtggcctaaattggccttaccaatttttgtcaatgtcaaattttggtaacttttggcatggctaattttggcaaaggaaaaattgtgtttggattgaagccaaaatagcctaaattaacggttgaaatggcctattttcttaggcatgtcaaaatttagctccacaccaaatagacaataaacactattgaaattgctaaatattggtaaggccaatataggcctcaaaacaaaccaacccctaatgctacatgcatattgtgaccgaatttttggaagttcgaagggaaagccttgattctttgtgcgagccaacggcggcgtttgaacgtggcgatccatcgaatcggctgccggcaacgcggggagcggttcgattcgaagcaatcatattatttttttcatatgcatgtctactggccagccagtgtgttggttatctttgctgattagttaagagtttggtggatattttagacttaggaggagtagtattattagtacatgatcacatattttatggtgattataaggtggaatcaatcctgggtcctgacaaaatagatcacaagcagtgaggagagctagcgtcttttgaaaggggggataaaccaaaatatatgaagggttggtcatatgaacctgaccctttttgtgggcaggttacagtggtatagatcgagagaactgcacgatcaacatcatcatcgtcatcagtacgcctgtacttcgtctaagagcaagtttaatagtatagcccactactagctccaatttatttatagctaattcatacaatagttgcttactatactattaatatagtcccacctatcatacacatattgcgtcttggagtccactgctcttctctctcatcttttatctcattaaaatatgtttacagctgactaatagtctgctattgtacctgctctaactctagttaacaaatgtatctcttgttcagggaggtacttaactacaaattatatggttgtccgttggaggctaggcaaggtaggggcaccatgctgatctccatttatttctctgttgtttactcgtctctggaatgagtgtgcgagagcttgtttaacgtggtgtgatacgtgaagacgtcacgcgtgatgtacgcggcgtcgcggccgaccggccggccagccggagcacgacggcagcagcttccttctccggcgccgctcgctgtagcgtagtgcttgcgtggagatcggcacatgatccgcagctcatcacatgcgtgcagatttggttgattagttagcaaccaacgtgcaggcgtgcaagtggacgtgataggaaaaccgcacttggttttaaacccggctgatttactttcttaatcatgagcacaaacaaatcacatggcatcgctcagataagcaatttttttttctcctgtaactgaggcttctcaaggcatcatctatgatcagaagcagtattaatactccctccttcccaaattgataatcatataataaaatttaaaatttcttaaattgatcatcatataatcgcatgaacacgaattttatcaaaatacaattaatacagcataggagaatatgtgcatgctaagagaaagtttaatagtatagccaactactggctccaaattatctatagctaatctaatagcacatttatacaatagttaactataaaaatatactacaccactaatacccggtcccacctcttatacacatataacgtcttggagtacgtgttgcagccggctacaaatctatagcccactttcttttctctgttctcttttcttctcgatatgtaggaaaatgtgtgtatggtgtcttaattgatgtgatttaaattatcattggtcttggtgcataaacatttatgatgattattttgagaaagtgagagtaacacatatgatctaaacaacgacctcatccagaatgtcgatgtacaatcaaccggcaagttgctgttaactagacattgagcttgtacactcaaaccgtcaatttgatgttaagtagtagacatgtttcgatgcaattgtttttcgccgagtttgaagcaagttgcaattgttttccgaatcaacttgatgcatgcatcaagattttgtacatatcctattgccagtttgatagctgcacgttccttctgcagcaggttatgattatggatgcataataacatgctatacatcccaggtatgtattgtacatttgtacggcagcatcgctgagcacggacaattctggacgaagatcgtctgcttatacatgatgtagccgtagaaaacctgattgtcaatacgccacttgcatgactttcaccagggaaatacaaaaaccgctttaacgccgcaacactgcacatacgaaagtcaactagcgctggatgtcaagatcaatcaaaggtttaggtcaagcagcaaccgcgaaacaaagaagagaaactgtgtggcctgcattggacaagagacttcagagggctttgccgccgagatcaagaggattttagtatggcatgttccattttgcccccgatgcaaacagtggtcagattagaaagacagttgcaaaacgaaaatcctgaaggctaagaaaggaaatagaatgaagttctgccacctggtcaaaataagcacatcaagctacggcagccgacttggcagaaaaatgcctttagagtttagattcaactggtgtttagataccaacctcgggtgtgttcggacctctcccaacctaaatccctccttttccgcaaactgctaaacggtgcgtttttttttaaaaaaaagtttctatataaaagttgcttaaaaaaatcaaattaatctatttttttttaaaaaaaatagctaatacttaattaatcatgtgctaatggaatgctccgttttccgtgtggaggcactatgttcccatcatccacatgcgaacacagccctcgtgtagaaatgaaacaccaccggaagcaagagattcctggtattgacagtttcacacacatatatctgacttgcaacaaaaaaaatagggtagcattgattcaaggtatgtatgcttttaaggaacacaaagatgtgagtattcctcagtacaggtgatgccaaaacctgagctctaacagccttgctgtccaaaaatttattatgtatcaagcatcaaactttcccgggggcaaaaaagacctacttcacctgattaatgagttcctctcatcaaaaggatgacacaagaatcatccactaaaattaagatttaggtgctaaactcaagtaattgatacaattccagccacaacaaagatggatcttcaggaatacatcgccattatctctgcataagaatcaagcactggcttgcaatgctttctctgctgcaccgggcgcgggcgtaacaccaccggttgttggactgaaaatatataaatgggccataagtccttgattcctcaaaagccttttaatgttctaacaattaaattaattagcaagcaaaaggaatacttacagtccaaccatgactttaaaagcatcataaataccccattgagcaccagtaagagttccaatcataacaatacgaaggggcagtcctctagtgaaaaggccccaaagaccaagctttttaacagcctgtgataatacaacaaacatgtacattcaattaacatgataagaacatgaatagaatacatgagacttgattccatatatatgcaggactttcgccatatgtatgaaacttgattccatatagaacttggtatatggtggtcctgtcgagcttagtacataaatatatcggatatcccatatttattaggatactgacagctcatttaaccacacaagttcatcatcattactggcagactatttttaataatccgcctatagaaataaacctctcttgtgctataacttttctagtgtttacgaagatttgatgggagcagttatgtaacattaactacaactttgatggactctgatgaaaggaacatacagaaatgcaactttcatatgcagtcaaccaacatgaaagtaacatcaagataagaaataaaacttgcacataatgggttttattagtagaagacatgcttacatcacccactgtagctcccttggcgttgttcaagaaagagaccaagttgtcagctggatgagagacaatggcacagaagactccagcaatgtaaccaccagcgaaactgatacccaattggaaagacttgctgcactcagacttcggaacaggaacagcgtgcttgtagatcatttcaacaatggtctcaaaggaggcaaacttcatcatagtatctggacacgatggaaatattcaatggatgcatagaagaaataacatgacagcatagctctcataaaaataaacaaacaaaaactcattggtgccatgccacactgtgttcaaatccccgtacgcataaatttatcacataatagttacatagctgttacattgacagctactgttaatccatacacagttgatggttcatactttagagtgttcaataaatattcatatatatataaatgttaacaaaagctaactgaggatagccaatctgcggaactacacatatagcagaaactacaaaacactttagtagtagtaaacttccgcctaaactgataactacattatccaaaacagaacagttaatttaaggaaatttgaaacggagttctctaccaacagaaaatagtaacagatgtgaagggtttatttttgtgttgtttcaggaaatagccagtgtttaggggtggacacaggacaacccatgggtaatctgaccaaccctagttcaactaaatgaattaaatttcaaccatgaataagtaaacagaacttaagtgaataaaccatataaactatgaaaaaaaatattgacaataaaaaaaagaaaagtgaataatatcagcatgagccatggaggcaatagaagttcacttgtacagaaaattcagttgacaagttagcaagttatgaagcagtgttggatattgcaactatcaaagaaaaacaagatagtgcagaattatcacacaagcaagtcctggaacatcaggttttagtgccagtctcgtgtagcagttacataaatgaaaacattaaaaataatatcaatgtagcaaagtgactaatacttacaagggatttggcgaccccacagaggaacaattcccttgtaaagcctgtcattatcaaggaatgagatttgtcaaggcgcataaaactagagaaagagttgccacatatcagattctaagataaaaacatgttatttatacttacccaagagcgccttcagatctgacgaacttggggagcccatcactcagtccacgagcgaatccaggttgggtttgcacacgaaccttcacagcttcaaatgggcagagagccacatctgcaatcacctcagcagaagctgatccagcgaggtaaattagggtcttgtacttctgagcatactcaggcccagcaatatctgagtagtacttcttaaagaactcataaaacccaaacttgcatgcgccctgagcactgtaaccaagcaaggtaggcacccatcccctgaagaagcctctaggtccttgctcctttaagaggacgccaaacccagatgttatgctcttgtattttgctggatcaatctgaaaaaaatcaaccaaaacttgtcagtccaaaatccataatagaaacatttcaattacaacttaaaacaaacattgactggacatcgcacattcaccgatcattttacctgcctacccaaccatctcaaagaatcaaactacattccaataaacaaagtagagaccggcaaaagggagatgcaccaatcgacttatcaaagtgagaaacataaagtattatcaaagtgagaaatataaagtatcttcaccaaaagatacacaagcattttgctccacgacactaacactaacaaaaagcttggaacttaacagtagataaatataattgctggtagcggaataatttgcaaccaagtaaagaagaaggattagtagtgtaacttaaataagagggcaggtgaatcaactctccagtttctacatacgccagttcaactgcagaaacactagtactgaacatgtttaacatcgatagctactctagtatctactcctcatcaatccctacgccaactaaataatgagaagcaagcacattggaaccgacgaagaacattgacgggacaaataaaaactacagattttaacgacagtcaaagctgtatgcacagcaaagcgcgcgcggctggatttacgcaaacggatggcgacatgcctagattcctagatggatatcacaagttcgcaaccacacgttcctctaaccatcgaacaaaactaaatatcaccagatctacgaaggagcagggctcccagaagcgccaaagccagcagggtcacagatccaggcgttcccccaactcacctgcatgttgcacttgacgaggtcgagcggcgtgacggccatgtgggtgagcccgcagctggcgatcccaccggcagtgcaggcggcgtagaacgccggcgagtacatctcgatcttctccctgggagcctggatcgagatgggcgcgccgcccccgacggcacccggagccggggaagctggggacaccggggaggggaagcgggtggcgccggtggcgaaggacctcgcggcggaggaggtgtagaggaagctcgggaggagcgactcgcgggagcggtcggagagcgccatcgcagacgccgccgacgacgagagatccgggatggggtttggtctccctctctctctctctcgcgctggctctgtgctggtggtggtgctttccgagagctctcgcgttcgcgtggaattgacgaggcggcggagggtgaatatgaaggggggcggcgaggcgagatgggcttccaagttgttagggcatcgatcttttgggaggtggagatgaaccggagggtcgctgcgtgtggggcccgttaatatgtgggcccgatgtgtcagcgtctgttggggttgttgttggtgcctggaatctgggctgtggagggactactttatggctagagaatggtagcggtgccaaaattttctcgtgtattgtacactcttttgaatacgatcaagcactacctcttatttttttcttagtcatctcctttttgttatgagaaataattattggccaagagctacccagcagttcctttttttgggggtcaagagctactattttcgatatgaaaataccgaccaattaatacgtcgactttatatttggctgaaaggtttatgagactctacgagtactgtaaagtcatggactcatggtaggagtatatttctccgagcagatgcctcgcgtcgtcgtcggcggcggcgaccagttcatagcgtaacgttcacaacgactggcggagacagtggcaagaatatgcaggtgaatattcgtgaccggcacgggcagcattattccgcccgcccatccgctccacccgacgggacgggaccagtcaccagcctgacctctttgggcccgacagcattccaggtccacggttattcgaatcctgcctgattctctccagaataggcccacattcacatgccgatcctatgggccttgctgcccgcatggcccaaccgacacagttacttcccgcgagcgccaatgtcctcctcttcctcctggccggcaagcaagccgcgcgcttttgcaccacgcacaagtcacccgcgcccaacactgcacgcgcccttctctactacgtacgccgtcgcctcaccacgccacacgccgccgcgaccgcggaatcgctttcgtccacctcgcaaagccatcccttcccacccgtgcactcgcttaatttccccgcgcgcgcgccgacccaatcaaccgtcgagctctccctctccatggcgcaatagcgcgcgtgcccttaaaaccggcgccgtgcccatgcaagatgcataccccacgcaagattttcccgtacagaattcgagcgatccaagtggttatagcttagctgtgtgatcgatcgatccacgccatgtcgtcgacgatgccggcgcagggcggcgtgcggcaccaccggacgtgccgcatgtactggtgctaccagtgcggccgcgccatccgcatcatctcctacccgtccaccgacgtcttctgcccgcgctgcttcggcaggttcctccacgagatcgacccgccgccgcgccccgcgccgcccccgccacacttcttcccgcagccttaccacccgcactacgacggccacccgcgccgctggctcatatacggtggcgaggcgccccccgtggcggcgccgggccgcgcgttccgccagcctgcgcccgcggtgccaggacgcgcgttccgccagcccgggcccgcgcccgcgccctctccagcgccggcgccgcctcgccgacgcatgccgtccccaccgccggtggcgcggcggccgtctactccaccggccatcgaccctgggaactatttcaatgggcccaacctgaacaacctcatcgaggagctaacccagaacgaccggccggggccggcgcccgcgccgtcgtcggccatcgactcgctcccgacggtgcagatcaccggagcgcacctgtccgacggctcgcagtgccccgtctgcaaggaggacttcgagctcggggaggccgcgcggcagatgccgtgcaagcacgtgtaccactccgactgcatcgtgccgtggctccgcctccacaactcctgccccgtctgccggtaccagctgctgtcctccgccgccgccgggtccaacgccaacagccgagctcgccgcggcagcgccaacaacggtggcggcggcggcggcggcgatggccgggacagggagcagacgatcgtgaggtgggggcccttctcgtggatgtggccgccgcgggggctcgaagaccccgacgacgggtgggagtacggacggcgaggaaggccagaggcgggcgacgccggcggtaatgacatgacggccctccagtcttttgttctcgtcgctacttgcgttttcttcttctccttccttacttgaagtcttgaacctccgaccaaacactcaaaaggcaacagccactcttgatctcatctgccactcttcccatgagatcatacatgattatgtacaatgaatctactatggaagaacaaaagggggaaaagggcttccgggaattggcttcacttgctgatttgattgattttatgctattgttttgaagtttttgctgttcttcaattctcatttcagcattctacgcttggtggcgctctctgtttcttttctaaatttgaagatcatcgccaaatagcaatcaaagagaaatacctgtttgatcagttaagtaacctgatagctaccattcttctctttttgttactacctgattagtaaagttgctctgattaactaatgttttgttggcaatggcaggtagaatgtgtaacgaccatggaaatttccgaaagttggtgacaatgatggatggctgaagaacatctgctgtaaaagttgaccatgtaaatgatagacatggcagtgcagaatgttcctatttgagcagacaatgaaattatgtaatgctcaatgcaacgttttaaagtttatcaaacacggagaataaatttaaccggtgttttccaacgcttgtccgttcaacggtgtttttcatttagagagcttataagagatctaattttacctcaactgacaaggttgatctctcaaccttcttgaaaaattgagcaaacatgaagtagacaacaggtcaaaggaaagcataatttataatttgatcgattttacactaaatgtcatacaaaattcactgaatcgacttatgtccattgtattaaaagaaacaatttacttccgagaagcctgtccttttaaacctgaattgagcatagtctcgaagccagcctcaaatccagcggtgtatgctgcattcttcagactcgtctgcagtgaaacacagccgcgtccgttacatgcttcacaacttaacgaggtagaaatttattgaagttcaaactgaagtacatcaccacaccaaactccaaacgtgggcagtttgatgcctgattttaccacaacgaaagtttcttatgaaggccttcacaaagaaattgtgacttgcaacatttacttaggcccatggctttttttttttgtttggttaatttttaccacagatgcttgttcgacacatattagtggaagctagggtatttaccacggttgcctatcatgaacacaaatgagcaatcagtgctaacatatagcagaagagaactaaccgttacactctccaaatcaatagtggcttgttctttaaagccatcaaatatagaagaaagttcttcctgcttaacattcagtttctttgatacctgcaaaagaaatttatcaacaaaaagagtggacattattcatgagggtcatcatgcacaatcttattacctcagaaaggaacaacggggacatgatgtcaaatacatcatttacaaatttctcaacattagctccgtttgtaggtatcttgctctgcgtcttttctgcacccttgttctgaactttaggcttagccttcacttctgatacaagaacaaagtatgccatgtctggttattgtaacttgaaagtgtaataaaaaaaaacacaagaaaaatgtaaaagaaatggaggttaatgagtaaaagacaacatgaacaagttcacatgtttcatcctcacactgtcatctattcctgcttgtttaattaacaatagttgttataatacagtagtacctccttatagtagcactactactacgctcatgtactgcccaaatgtaaggactatagattgcatatacagaagaaataacaagggacaatatatatatcagtagataacagcttaccaggaagacatgttttctctttgggcacatcattttgacgaggaacatttgtaggtgtgaccttctcaattggttctgcagaatttgggacacctgatggtacaaaatctgctagatcaggaggattatccttgcctacaactggtgaagcctgcacaaaaccaataatttcacaatcccttcccagcacatactccctccatcccaaaaatataaggcacccttatttctaggaaaaatcaatattggtaacttttaactaataattaagctaataatatctatgtttagtgttacgcattcataacatttagacttgtgtatgaaagtactttcatatgatactaattttgtagttgttaataacattatggaagaaattaatgatcaaagtatgatattgagggccttataatttgggacggaaggaccgaatgaaatcatatgcacatattccggtgatccaaagattacctctaagtctacataagctggttgcctcccaatggacatgagaaacttgtccagattgcttgagctgagagctgaaatggagtaaatcaggaaaagaaagccattttactaatctattcttcttttgaaaaaggtaaagaaagttgaacggaggtctccctccttataaaaataatataacagtagccagaccaaggccttgtgcaacctacatgaaactgtgccatgataactaactaacggaatggtgtgcattctagtatcacagtaatgactaactaatgacattacacatggtgtgatgaaacagtgttggttacggaagtgatgatagtatcaaccataccgattgtcacatcatttgtcagtggatggaagtagcagctctgttttgacttgaaaccttggtccagtagtagtgagacagcactgcttgcaaatacacagttatatgaatcagttaaaaaggcaatagcataaccatgaaaaaaactgatatataagtataatataataggacacattaaaagctaagcattataaaacaagaggcatgtggttccatcagtcacaaccatagcatttgcatttctaatttctatcctaaaagtggaaaccatcaagtggaatgaaaacaacgacgctcggatataaaatgagcacatcacactagtaaatagctcttcaccgtttaaggtaaagtgaacagagctcacaaagtttttttttttcaagtttaaaggcttcaagctattagaaatacaaattccacaacaatggaccgaattcccattccaatcatatttaattaacatgtgaaagcaagcacccataccttgcagactcattaagtagtgcaaatggagtaacacagcctaagggtacctggacataatcaaggacaaaatacattaacatgtgaagaaaattatatagggtgaaactataacaataagctatccagctaaaatgctggtagagccaggaagcaccaaaattcaagtactcattaaagatgaaacagaaaaagggcaagacaatacatgaagggatatttgttttttcacaaccaacaatattcatcacaggcagaattttttttttaacttttgtgaaattttcacgtaatatatgaaactgaaagatgcactatatttcgctcttcgttgctttcaaacagtatgcagttttagataaacatgaataatggctgacctgaagcacttcaagcaaattttcctcaggagccatccgcagaccaccttttcccaaaccaagacgctgtgataaaactaatgggtttaaggaaaacagaaaattagttggcatacattcaaataagtaacaaagaggatatagttttcaagaaatgcacctacttttcatgtcaactttggtgccagcaagggcagaaacaacgtacagcctatgctttttgtcctgaaactcagaatttaaaaatatcaatacatgaaaataggttccaagaaattaactgtccatcacttggtaagacacataccttcagtagcaaatttttactcaaagcacctcctaaatgcccaacatgtttggcctaacattgcggaagttcaattagcacttacagtaaatccatcaaaagtattgtagaacgaagtgtgaacttcacggtttgcaaacctgttcctccaccgtcaacacaaccgggtgatcgtagcacgagaattcaatgttgagctcctgcacaagacaataccactaaattgagtcgcggtccactgtgatgccagaaggcaagcaattctagtttgccacacataggatgtgacaattctcgataatcgcacaatataactgggcaattccggccttcgattcatgcgcacatccggggttaaaaaaaaaaaaaaaaactatccgcagcacaacccaactaaattcggcagcaaaaacgccctatcgcgcttccatttataactatgctaaccaaaaccaaatcaagctagaacggaacgggaagcatctcgccgacgctacaatccgtagcaccggcgcatccacgaccaccaatccagccgatccccactaccaggaaacgacgcaaagcgaacagtcgaggagttgggaggtagagagcagtggcgcccagtgggcggcggcggcggcaccaacctggagtcgcgcgaggagctgctccttggtgtaccccatggccctcgcggcggcggcggcggcggcggaaggaaggaaggagacgagtagggcaaaggcgaggctgtctcggcctctcgggttcggatgcgaggctgctatggacgaggtggatcgggcattcgggcggctggacgacgcgcctttaacgggtcgggctcgtttcctcagatccgaactcgcattaccccgcgaaatgcggattcgggctcgagcgtgacgagaccgatacgtgcctcctctcgtttttaccctctctttttttttttgagatttggccggtcgctttcttctccgacggacactgcgattaatctaagcggcgcgccatgatccgctacgaaatccagctgttttacatgatagggaaaggaaattctctgttgcttttgaccacagctcacaacgcccatacccttttcttgcaaacatatacagatgcatactgcagttgatacgtgacagtataaaaataaatattgaccgcatcagctcgattagtaaataaaacgttttggatttgacaattagagaagcgggacaagtgtagcattttcagcagaggacggcgatggatcaaagctgggtactgaaatacgacagacgcatacgactgacaagggccccacagacacacgcacagaagttaatttaatttcagtcgtaaggatcccggaaattctgcgtcgactagataccaatcatgccataactgcactagtaaaaaggaccattatgctttggacataagttgagaggagtataattaacatcatagtaattgattatacttcattacttgcaattgcaggaacaccacttttacacatggtatgacatggaattgaggggagttttgctccatggaaagctgccttaaaacatgtagcttcatcagagctcccacgcaattcagaattagcctaaaataatcaagaagcagtagcactagtacattgattaagtatatactacatatatatatgtagataatagttatgaattgaatgattatatgattattattgtaccgtggccaattcttggtcacgtactgatatatcagtcagtaattgaatttgcgcttaatggtgatcactggagagtgtggaggcttcgatcgatcgatcacctccatggatttggtctccatcgatctccggttcgatcgatcagttgagggaggagaagctccagaggctgatctcaccttcgtcctcccactcggcggcgagggactccggcgccggcgagaagaacgtgctgcatgggtccatcatggagtagtccatgcacttgggcgactggaagaaggcgtcgatgtcggcgagcgcggcgtagtccacgtcgtcctcgcgcgccaccatgtcgtggtcggcgccgtagtagttggcggtctccggcgagctgacggccgagcacgacgacatgtcgccgtagctgcacggcggcgtggtgggcgcggccgcggggttgtagccgccggtggcggtggcgaaggagggggcgccgctgtggtgctggagggggctggtggcattggcggcggcggcggcggcgacgcgctggatggacttgggggacatcgcggcggcggggatgtggaaggggaggtgcaccgggaagttgaggtcggcggcggagcccttgaggcagagcagcgcggcgtcgtaggcgcgcgccgccgcctcggcggtggagtaggacccgagccatatccgcgtcttctggttgggcgccctgatctccgacacccacgacccccagctccgcatcctcacccccttgtactgcctccctctccctcctcctcctccgccctgcctcgccgcagccgccgccgcattgccgccgctccccggcgccgcctcctgcccactcttcaccattgctcctcctcctcctccgacgccgccgccgctcacctctgatactccgacgtgtgatcgttcgatggagatggagatggcgatggttcggaccaaactgcaaagaagacggctgcaacaactgagagtagtaggtaggtgtaggtgtaatgcgtgtgtgtggctaccggctggtgtgatgtgctgcatctcatggcttatttatagggcacagcagctgagcagcatcagactgtgtataattaactccatgacttatcttatttatttgcttattcttgtctagactgaactggttgtgagtattgtaaccatttttgatagcgtcatgctgataatgtcatttgtttttgggcaatttgtacacagtaccgtgcagctacattagcaataatggagaggaaatactaagaaaaccgatcggattaattaggagacaaagggaataagaaggaaggattctactgattcgatcgattggccagtagtagtacaactgcttcatacgtgcacgtacgcagcatgtcagccacagaacagctagctaattaaccagcaagcatatgcatgatccgaacagcaacacgttttttccttaaagtttactcctcgagtgtggatgagttataagcacagtgtgcatgcatgcgtatatgattagtagtatgaggagcattggcgtgaaatggtggttcgatcgatcgctcctgtggaatctaccatcattttgagctgtacaggtgtccaacaaaaccggtccggtcgtcgtgcttgtacatggctgggtttgggccagtacatcgacctggaactgacgaccgacgtctatccagagtcgtgacagggtgtgttgacagtagtagcgtcctaattattgtggagtaattgattaatttgtattagctccgtttccgtttcaggttataagactttctaacattaccaatatatattcatatatatgttaatgaatctagggacatatatatatatatatatatatctagatttattagtatatatatataaatatagacaatgctaaacagtcttatataatatgaaatggaggaagtaattaataactcgacccgtgtacttctgcagaatctgcacggtctgattaattagacacgtttcgaatcacaacctgttcgtacctagtacaacaagcaaatggtttgggagaaaccattattgcatatttcatgtacgtagtactggtggtgttccgacacatcgtcgacggctgtgtacatggcctgcagccagccagccagcaggccagcgaaaaaggccgtgaaaaaaagtctacaagacacacgtgcctgcggcgacgacgacctcgggttgttagttaaatttaaccctcgtgctaattacactgaaccgtgatcatcaaacagccgccgtgttgactacccacagtagcatatacgcacagctgtgtgcagtgccgcagtgcaccgcccgctccatcctagctcgacatgtcagcacagccacatgcttaattagcgagacagtaagtaagcatgattagtagttgcaaattaagccgagaaaacgcaggcacacacgtacgcgcgatcatggaccactgtcgcgtgtggcgtggcgtggcgcgtctgcaagacagacagcttgcatgcacagtagtgggaaaccatgcacaccggctcgtcgtcgttgccggaacagtagtacctagtacggggcggcgaaacgtaggagtacgtgcatatatgcgtgtgtgctggtgtgtattgaacccttgtgcagatctgttgattcccccgcggccgtacgcacgcacgcacgcacggagaagggccaggggccacccgcggcttcgtaggcagcttcgcgcgcggggcggggcggcggttgcagcgacccagagagatgtgtgtgccgtggggaactggggacgcggcgccacggccacttgtttaaaaccgttcggttaccgaatacagttcctgaacggcgtttccactgtgattaccgctcgatatattaccggtaaaaaccggtgaaacccggaataagcttttctttaaaaaaactaagaaatagcccgaattcttataaaacaatttctgtgtttgtaccaactattaccatcgcattttaagcacttgccagtccttaaataacgtactctctctatcccaaagtctaagtaattttaaccggatatgacacattagtactgtgaatctgaataagtgttaggatgtgttatattccgtcaaaatctcttatatttttagataagaggagtagtataatgttgcttctgagatagtgagggacatttgttctcttgctcgatccctccctgacttccgcaaaaagtaatgtagaaaaaaaaaactcccatttatgacccattttcctctcgggctcggcgattcacgtgggtgaagggaaggagaggccagattaggctcatctccactattagtagtgagcgtaggctggtcggatatctcccataatcaggttgttctcattttgtgatcaagtttgctagcatccggtctcctcatctcgaggatagtggaagaaacgttgaggctatgctatggtgtgcccaaaaacaccacagcattaaccatggtggttaatgaaatttggtacggttctttagtggatttggttaaagaaattaactaattggtagatggatgtttatctagatcaaaccgagttcaagaaggaattgtgaagaccacaacgaggcaatttttgtatttttagtacatatatcttgaatagacaggttatttattttccttttcttgttattaagaaatcttgtatcgtgtttgatcaagacttgtatcaatctgagggtataaatttttacaccctagggctttacgagacatctccacacatcaatacaattactttcggtgcattgccaccttttattccggcaagttcttagtttcgagttgggctacatcgtttggatcttcagcgaggaagtaatttccatcatcttcgtctatatcagtgtgcctagaactttctctgataggtacaatattctaaccaagttgatgcaaaaggatgtctatctaatatattggttctatttttgactgtatcgttgtttagagtcgtatcggcttagtacttcctcgattaggtccgatattccgactaagctggtatttctctaatcacattgttgtttttgattgattcgatatccatcatgtttgtgtagatctattggctaaataggtttttcttatcatcttcgatcttatactgtctcggttaggtctgatctattagattattgttgttaataagtttgattcttgtaaggcgataggtttttatgcaatggccattagagttctagctgatgtgttatcataattttgggcttcaactatcatacgtatcagctagctagccgatatacatgcgaatctacttgcataagatctccagccgatgtacgctagcattaaccatcggacctgcatctaccacattatatcagtattggtcgattggttcattggttcaattctttatatcatccttgttagttgtaggatcaaactaactaatacgtcttgaaccctaaaattaggatttgcactggagttaagcagatctccaaggccttcgtgtgtcacgacatattttgtgtcaacagaaggcaaaactcaaagaaaacttgaagtaggcaattgaagtggatgcgtagcttgcagttgctggatcttgtcgcctagaggcagcccgggtggcgaagttccatgtggttgctggttccggcaaacaatcagtagattcaaggggtagggaggggtatgcttgaaaccatcatatccagttgaaaggaagcagacaaagtgacaccggtctttaaaccatatggggcaataccaggtggtgaagtgctccgacatcaagttgtggacaatgtaagacgacttcaatattgctatctctgtgaaggccatcgccgacttcttgtagaaaagagagtggtcatgccgactcctttgatgttatttttgccttctgttgcagtttgttgatttccagttgaaacatatttcacggttaccatccaaaaccttgcacgaaccatgtatattggattaagatggggaggaggatcggaggcgggttctcagtactttaattatagttgtaaccatgtgcaattcaggttgggtgtcaattgcctatgaaaacactggacgacaagtttgttgctagtgcttctcaattttgacagcgaaaaccatggcaacatttgagtgagtccggtgagagaaaaaactatgagtcaactataaacctcaatttgtgcggtttacgaaggcaactgaaaggatcgccattttttcaaacaatatgcatgctagtagaggcatgtggatgaaatcattgcgacaatgccgttgctcctcgttgaccgaccctgtctattaccgatttatggttttacctcaaaaactcccttagttcaaataacttcattttccccgggatggttttgcgcttgttctctaataagtaacatggtgtatttccaaaaactcaacattcatcatgtgaaggagttcattatttaaaaaaatggggtactatgagtctgtttggtagtgtttcaatttctaaatttaacttcaggagttgggtctgtattgaaattgtggagctgcctaagtctagcttcacctccctagtttaatttgtgagagcagtttagtcaactccactccttttttgggtgaagctaaatctggttggtcttcggctaaaaaaaagatgtaactagagctgaaactgtgcgaacgaaccctatatttttttaagggttaacttgatactccatccatcccaaaatataaaggattttgggtggatgtgacatatactactactacaaatttgtacataactcatgtctagatatgtagtattaggatgtgtcatgtccacctaaaatcacttatattttgttacggagggagtatgtgtcattgcaaatgcaccaattcaaataaatgctattacaattcgcctactcgtaaccgtgtcagttattttttttaaggaaaagtttgaccagaattcgtagcatggttctaattttatagaatttaagtggcatggttataaagagaggaattgtaacgacaaatttacaattgcacttatcaaatttaactcattttttaaaagtgagacgagacacaccgctgcgcgggcgcgaggggaggggagacaaaagacaacaaccaaccggcgctttgaattcggtgcgcgcgcgtggcatgcagtcgtcgatgtcgcggcggcagggaggggggaggggagaggagagaagatgagaagatgctatagcgagagctagctggagctgcactggcaggcaggcagggttgcgaccgaccgcaaaccgcgtggagttgataccgatcgatggcgatcgagaggaagaggatcagattgagcacgtcaatgtcgcactccgatccatctatcctagctagccgatgaccttagcagctgcaagcagattcccggatagcgatggctgcctcacgctgacgttgccttgcgtaggactgtagccacatctatttgtccatagtgattacttgtacactggtactactgcccgttaataacgctatggcaatatgggccattttggtttggtaccaattcttgccctaacaattctttagtagttttgaatagtgcatgttagcattttggattggaaccaatttttgccaaatcaatagagtggagccaaatctatactatcaaaaatttggtagtgccaaaatttgcccaaggtttggtactaccaatgttttggtagagtttcaaaccaaacatgccctatactatgacggcatgcgtgtatacatgcatatgccatgtcccgggtgtaatagtaggttttttcattatctaaaaaaatgcaatggtgtacatgaccttcatcgccaaaggtcttatttaatttgtagtagattactgcatatgattgttgtgaattatcagcttgatcataaggataagctaaatatttactgaaataagcttaccaattaacttaaaatgcgtgatctaattacttaaggtagaagaatttttcttgagtaaaacgtatttttctaaagcatgaattaaatactccgtttcggtaatctaataaaaaaatctagaaaagtacaaggccaaagtcgaggaagattgtaatggttggtggatcgtatgtatttattatagtagccagcgtacaatactggtgcgaacggatggctggaaagtacatacgtgcttctacctgggtgattgaaaactacatcacattcgctcgtgctgtcagcaactgaaaaggttgaaaactacgacttttgatacgaaatcgctatatgtttcaggagaagactcattttccttcacggaaaaagaagaacagctccggagcaaggcattaagggtatcggagggtatctgaagatagcatacatgctcacatgctttgtccatatagaaaatcatcattacatttacacattcacaccaatcttaatctgtcacatgtgctttcagtcaaaagtggcagacatttgtgttcaacatgagggcgtgcgtaactgtatatggttgcctcttgcctggttagagtctgtcgttgtaccaggcatataggtttgtctgatgtgtgctgtctttgtgcgccaacgatagccataatcttaggcaaactaagagtgtggttagtccacaccaaaattaaaagtttaagtttgattgaaattggaacgatgtgacgaaaaagttggaagttcatgtgtgtatgaaagttttgatgtgatggtaaagttggaaatttaaagaaaaagttggaaactaaaccaggcctaacaacgagcaacatattcattaagtactagcttcactggtaattaaattgagtccgagttaattactgcatcaaactattaatttagtgatcgcaaactcacactcgagagatgtacatcatgtaatttctcccttagagcaggtacaataagctgactagacaggctccaaaatatgccacatcatttaattcctatgtagaggagagagaactcaggagagagaaataagccgacgcttattttaccgcccggctacagcgcagcttttcacacattttgtggggccaacctaacaccacctaatcacgtgatggactgatctagtaaagtacgattagaaaatgaaaaactaacaccggaaaatggagtgcagcctactgctgtacatactagcttttaatattagctgcactatctgacatgggccgttttaccgcctgttgttagctgcattattgaccttgctcttaaaccagcgctatagccacagcgcctccgtaccacggggacaaactggcggccattatagtccagatcgaacaagtaccgtggtccgcgtccgtccggtcccggccggcagccgccgccggcggccagccggtttccaggccagctagctgtacgtgctgctcggccccccaccccacgccggaacccaccacctgcacgatcttgactttgggtgtatccccagccgtacaaccacatgtaccctagctctgcactcacttcgagtgatcgccatgccgcttcaaggttgaggcttcctttaaaatacagaaaatttatcctactgttagactgattcatgttaagttttctttataaaattcaaataaaattaatgtgttttaaagtatatctaaattcgcctgagggcatggacaacgtcccaccgtagcttatgactttacggctccgcctcaatggcaagttgccgtggaggagagatgagaaaaagtgagtggcttttagagagcgtggttgggttgacaaaaatgatgtgatttatggtgagagaacattcaactgttgcttgaaaggggaaggaggtggacgctaaggtcatctgatcgagtatctctcatggagtcgagcaagagggcggtgatacaccactctcgcaaccacaaccgccgcgcttctcctagatcagggtacccttgcggttgactttagcaacctggaagcatagctattaggaccggatcgacggtctgacccaaaaaaaccagaaccaggggcttagcaggtcaggtccaatttaaagatcgaacgtgcaatcaacccaggaaaaatcgattgaaccaccagtttttggaaagaaccgggcaagtaaaccgctaaagaaccgggtgcatgtggggaaattgggtgagaaagggcccagcgcaggctgaaacgtgggggagagggaagaaaataggagaaaaaggtgggttgaggggttcaaacactcaatctcccctttagactcaagcaaccccaccactgagctatgcatacttgtgcagttaggctatatacctcaatttatttaaaccgtgttgggccagtggttcaaccaatcaaaccaatcaaaccgcgaaccgaggctacgaccggttcgatgtccggtccggtcctaataactatgcctggaaggtgaatcgatactcggtgagcatagtggcggggcggccacgtttggagcacaaagacactatggtggctggttgaagtcacgagggatggatggcaagttttctgttgttgcaacccaaatatcaatagcttttggctattttgtaaaaaccctgaccccataggtaacatgtagctccaccactggtgacgacggtggaggacagatcccaaagcacagaagggcagtgaccaaatctagagcacagagctacggtgccatcgagagccaaaaaggacaacagcaacaaagagttgagaaggtcggcaacatgcatatatcgaagaacaaaaaagaaaggaatggagctaggggaaggacagaggagtatttgttcacctgacacgagggccagtgcattgttataaaatgatttatgatataagggattaatgtgcatatttgtatcaaagttaaattattttatagactgtaagagcatgtacaataaattgatatagatgagctatagaagttgccacctcaaattcgtactgagttggaggagagaaaagagaagagaaaaaaaaacaagcgatagatttgtaatcagttccagcagggacactaagaaattttgtaagaataaggtgtgaccaattatcaataatgcaataaatatgtatctaactattatatgtgaagactattaagttgtttatagataatatagtaatagatagagctagttcttgcttaaaaaaaagtaaggctgagaagcaaatccttttctagacccattcaaatcaccgggcattgggaatgaggtatcctcagttgtgattttatctttaagagcaagtataatggtaaactataagctggctaaatgctaagggtggaggagagaagagagaagaagcgggctgtaaacttatagccggcttggacacaaggaccaagaaactctgtgagagagacaagtgggccctgtattaacaataaagtgctaactattatatgggtaggctaagagaaggctacaaagaaccttatagccaacaggtcggctgtattagccttgctctaatctatgttgcacactctcttcgaagctaaacctcgaggccactatacattgttcatgctcggaccgcgtacagtactgaccaaacaggtgcaggcggcacacgatatcatcgtgccagcagcgtgcatgcgtggtacagagtacgtgtgcgcatgtcacatgattggtcatgaagactaaagaacagtaacttgttctgggatgggtgcttggattgttttttaaaggttgaggtgtgttgattagttttttagaaaatttctagcgtgtctttgaaaatttgcccatttatatgttcctgaattttgctcatcttcttatatatctctgaattttagtttggattccttccataccttttacgtcagtgacagttaaactcttatgaagaagtctaatttaccctatggtatgaaaaacaaatactctaaatttgtaaaatataagaatttattatttgagacttttatagttatgagtttataatacaagatattatttatgacaatttattcttagatatgacataaaaatattatttattttttaattattaaaaatgtatatgtagtttattttgtggatagtagtacaacatgtttgctatataaacaaatctatttatatgctacataaataatttttaataactataataaataaatattagttttgccatatctacaagtaaattttgtgataaataatatcttgcataataaacttatagatataatagtctcaaataacaaatttctatcctccaacaatatactacctccatttcaggttataagattttttagcattgtccacattcatatagatgttaatgtatctaggaacacatatatgtctatattcattaacatatatataaatgtgggtaaatgtgggcaatgctagaaagtcttataatatgaaacggatgaagtatttcataatcttatatgtttcttcgtaccaaaggaaaaaaatggactttttgataggaatacaacagtcaactcacgataactaaacaaaaaggggtatggaagaaatccaaattaaaattcagggatatataagggaatgcataaaatttagtagtgtgaaagggattagagaaagggattagttttatgacagaacggtgagatggatctgctcggtcagagaagatacctcgcagctcggctctgtacttgttttatcagtcacggtgattcttgtgtgtttgggggtgtggaattgttgatttggacaaggggctctgctggtccgggaggcaggtaagcagagcatatggatcactgctagctggggttcttctgtatggtggctattggctaggatgtgtgtgttcaaggagagtatagcgttatctgcttacgcaggatatcactggtcaaagtaggaacacatatcaacataggacttctattttttcttttgccttgactgtgttaccctcacatgattggtatgcagttcagtcaggcatgtttggaaatgccggaatctcggtgaatttccgagcaatctgtaacagatattgccaaaccccttctctctatgtcacagatacatgagtacacaactacacatggtcatatcaccgatctcacattttggcgcatgaaaaaaagttgaaagaacacgtagcatacaataaactgttaaatgcatgaacaataaaacgatgtacccgtttttatagacaatattacattttctgcattgttaaaaataaattgtacgagttatcttttggtaaaaaactgtacaactttttgttttttgcatattatgtaaatgggattacgagttatcttttggccaaaaattatacaagttatttgcatattatttaaatgggatttgcgagatttaaagtgactgaaattactatgaatttcactcaccttcaatcgagcactggattttgggagggagaaggggtaaatcaactgcgacggcaatagcgacgacaaactcttcttcaataaatgcacagcgacggtgacgaggttagagttgagggtttatttgcaatcctatccacccaaaaaaaattgagtgaaatttctgttgttttcaggtgattgataactagataatctctatctaaatataatgtgaaaagaaaaatacacaaagagtatctaaaagcatcaccaacagatgtccactattgtacttcatccgtttcaggttataagatgttttgactttggtcaaagtcaaactgctttaagtttgaccaagtttgtagaaaaaaataataacattttcaacacaagataaatttattatgaaaatatattcaattattgatttgataaaactaatttagcatgataaatattactatatttattataaatttagttaaacttgaaatagtttaactataatgaaagtaaaaacatctagtaacctgaaacggtgggagtatctcctaaataacttggtctgtaaaaaagccaacctgccgacgagtaggtatagcctccataccaatgccagtgcaagacaaaaaaatcagaaagaaagaaaaagaattggtatgaacatattgttctcatgacacaacctgatcacgaccaatccctagtataatcacacaggtaagtaaaacacaccctagcaatttgccacgtataccaacaatacaaaagaggtagtgacagctggtcttctgtaaccctctacgtagacaagcctgaaatccaggagggtcaaaaggccaagatcaaagaggagatagcgaccaaaaatgaccagcctcatttttcaagcagactaacgtcacctcgtttagacatcgctcgattagtcgattgcgatgtgcagagagacgtttcattaaaaagacgccttcaaatctcacactttgctaggaatatctctccctataatttacaaatacgacaggtagtccaatactaccccctaccggtttcattgacaaccacgataaaccgataaaaacacgatggaacttagacaaattttatcaaaaaattgaacatttgtttggataattttgaaatatggatcaacttcacaacacatcaacaccaataaacccgagaaccgagcggttatcgtcgcattttggaactcttgtccctctcacagcatgtacatgaatgcaccagcagtagcaggcaggcaggcaggcgtctacctcatcagacaaacgagagaagaaccggtctctcagaggtcagcaagacagcgagtgagcaagacaacaaactagctgccgtcttgccgcccccacggcgacgcggtttaacagcctagctcgcacaagaaaaaaaaaaaaccccatgatgcaatccgatcgctacacacaggggcagggatgatcgttttttgtcatctccttcccctcttttccttctggttcgtcggatcgtcaaagcgagaaggacagctcgaataaattatctcccagagagagagagagagaaagaggggaagatctttcatcctcgcggcaaagagctggaatgcattaggagcaggggacagtggatggggagggaagcttcctcttgcgtgcgtgattattagcgtgatgggggcgggggctcagccgctctcggctcaacttcgatcgcttttgagtgctgtggtttttctgttttgcatgtgagggagggggtgaaggtgatgttaacctggctttggaaaaggcagagtttatgcctctgctgggaaataaactttgcttgcctaataactgtagtgtgattctgaagacattccgattttgtagcagattagaggatccacaaattaggtggggatcattttctactgcaatgtgtaactacgggttctagggtgttgaaatgggttttcaactccgaacaaatttacactatgtttaaacatagtcaaagttcgtaaaaaaatcaatgtattattgtattatgacttgtgtcgtataaccacaacctttatggtctaagggcgcgttcgaaactgatggttctaatcttctactctctctttttcacacgcatgcttcccgaactgctaaagagtacgtttctgaaaaaaattatatatgaaatttgcttcaaaaaatatattaatctatttttacttttttattgtagtatttaattaatcatttgttaatgaggtactctgtttttcgtgccaaatagaggttccgaacctacaggttcaaactcagcctaagtgttttttttaaaaaaacacatgttaagtcccacttaattttagtacatctgaaaaaacattattcaattaggtgaagcgttaaataaagcctaataactgtagtgtgatcctgaagacattaggatttcgtagcagataagaattttgagtaactttacggtagtcattactgttagtattttgttgccaatattatcatgaattgaagtgataccaacggttgatttacgagttctgttatcagtagaaacagaattctactagtattaaggttcagaacttatgacagattagatggagattattttctactgccatttgttactaggggattttggtcttccactgtagaaatggtttccaacttttaagtgtttgctcattagaaaaatatgggagttctaggcaatatcttgttcaaaggaccacttaattgtactacacaaatacttactttctacgttgtgccatcatgaccactggtcggggaaagtttcagcaaaagagggacatgtattttgcaggagttgagagttgaggctcacttggtctttaaaatatccatttacctttccagtctactaggaacgtgagaatttcaatatctaactttcaaaactaggatcgtcacttgtattgacagtggtattcagtcactactacaaggtctagggattagagatggctacgattcaaagtgctgggaatcaagaatcagtaacctgaaaagtttttgggaattagggacagctatatcgcagacaattttttagaaaacgaaatttcaacagctaccctttgtccctttttaaaaatgagactgcatcaatcacctgattgatttcactttcccagtacaaaagtaagagaaaaggaggatggctttgtttggaggagttctagaatgatcagtcactgaaggctgtggctcccatcggatggtccaataagccaaagaataagccaaaatttgaatttttaaacttaattttgaaattgattttgaaatattttcaacgtagttttttttcagcattggcttttaagttacaaagaacacatatataaaagttttacctacaaatttatttttattccctaataagccgttttggcttattagaaaaaaaaaagccaaccgatggtggcctgtactgcctaagtgcctaggctcacactctcactaaccaacttcatactgtgactcaatgttacttgctcaggaatttgtttaaaatttgagagaactatcacaaatcaaatggtttaggaaacaccctggtgtaaaagtgcttgtcaatgtaaccaaggatttcagaaaaaagaaagaaagaaaagcagcctcagaaatcatgagtagtagtagcaagatgttatggtacctgtatggctctcctgtggccacttcaataaaaggtacagcagcagtatatttgtttgtgcactagagccactctgcaccaagaaaacaattacccattaaaatttgatacttgatagtgcttaacagctgatagattggtactggcatctattctgcaatctccaaaaagatagtgaaagtaagattgcatttgtattgtaccctaactgaatgatagaaccagaataaaacaactggcacgagcaccaaattcaaaatgtactgaggtgaaaagaacaaatagctatactattagaccatctgctataatggcatgtcccccttatctttttttttagagaaagagctcactagcatgtatgtcctttaagatgatatgcatacagaacccaggggttgtgcttactgtagtcgatccatactatagtttatagttctaccataatactaatgttgctagaaattcaccttatgcatgtcttaatcataagcaatattatttgtatcattatattgttatagtagatgcacttatcctattcagtttgtgaagaatcaccatttcattataagcaggcccatagatcccccaaggccccaactcatatgcttaataaatcctaaaactgtaaagagcagattagggtggcaaaatactaaaatatggccaatgggtagctcttgtcagtgttccattttcttgcgaatgcgaaatgttgtagacaagctccaatcctctcgattcggaaaatagagcccttgatttgaaaaccatgtgaaatcattctcagccaacatcagtcaattttcattaacagagtttctgaattggtaggcatgacaataaggcatattatactgatgataagcagtaaatatgaccatcgagcattgctacacagaaaagaactgaaaatgacaagaaaacaacatcttgatacattgtctatatattcaccagaaaactaggtgtataatacccactcttcggttgcaaaattacaagaaagaattgagctgcatagttatgatatatacattcgagaaactaaagactgacaaatgaactattgaaacataaagtcctaaaccatcaattaactacagaattgcaatccaatctacaaatcattgcaaccatctctctcgtactgtttatcaacactggagaaaaatacaggcgcagtaatatgcatcttttgtatcgcacgccacaacaccatgcatttaattggtgataaaatcacatccttatcaagctttcaacttgcaaagatgataattcgttcatattcactccacagtgtattctacccgctacttgcatcaactaattgacactctgcagtatcccgtttggcaatttttctgcatcaccatcgatgtggcaagggcatttccagataagcactaccgctgatgtgctccaccatggtggactgtaccagtgtaccagacaagcagtaacaaatgtctacgcggaagtagcgaaaacttaccggaaaccgaacgccacgaggttccgccggtccgcgccgccagctccgccggcatgtggatggcgcgtgcggcgtagaagggggagagttgggggggagatttgggattggcggatagcggatgccgccatggcggccggcctcgagccctcgagccctcggctcgctcgctttggatgggggaggaggaggaggagatgcgcgacgtcgcggcgttgtgggttcgtgttttgggcccatatccatggtgaggtgggcctagcccatcgggaacacgcgagccttgcgcgttttgggcccataacaaaagtgaggtgggcctggcccatcatgaacacgcgagccttgcgcgttgggcctggcacgtgtgcggcccagcccgtggcagcgcggctaacctggtcgcctctcgccgccggcgcggagcgtctcagcgataacccaaacgatatcgatggcggcggcggcggcgctaaccgtgcttccgcgcgcggcgggcgtactgcgcctctcgcagcatgggaggtctgcctcccgcctactctgcgccgcagccggcgacggcgaggcgtccccggcgccgcgggcggggaggctggtgctgtacacgaagcccgggtgctgcctctgcgacggcctcaaggagaagctccaggccgccttcctgctcgccggcacaccctactcgctcgcctccctcgagctccaggcaagcagactagaccacgttcgtggctcttgcgctctctctcccttggggggtttcatcctgagaagttggggtttgtgtttcgatcaggagagggacatcacgacgaatccggattgggagcagatgtaccagtacgagatcccggtgctcgccaaggttcttcccgacggcagcgaggtgtggtgtcgtcctcccaatcgcgctcgctcctggccttcagtttaggtgttttgagtctagagtttgtgtcatcatagctcatatcaatgatcgttttgcaggaaaagcttcccagattatcgcctcgtctaagcgtggagctcgtgcagaagaaagtgttttctgcctttgatcagtaagatattttcacagtttctttcagaaggtgttttttttcttccagttttgagtcagcagctatgagaatgccgatggataatggatggcatatgtgatctttacttgttgtaatctttattaatctctatggatttgagaaattatacactaatttttctggatactctattcggttcagaataagttgtgcttgcttatataattgataatcatccgtatcgctataaaaatacagataagcgagcatctgagcacaagatgttacccatatactcacagaatggttctttgggacaagagcaatctatataactcatgcaaatgcacaagctgtttggatgaaaaatctctgaacgcattaaagaaacttatggttaaccacccgtagctggaggttttccatcttactgctaaagaacttaaccatttcccctacagtgtttttggtcaaaaagagaacttaaccatttcatatatacacttggttaagatttcttgagcattactctgcattagtgtaggactttcgctcagaagcacttcatgcaaccttggatgtaactgacaaaatcacattgaaggaacaagtgtagaatcaactgcagaagacagtaacaacagttatctgacctgaaggcactggcctgtagagtgcatggataacagataaaataaatcaacttgaggttcgaatactgaaacttgtgttcaactctttataactaagataaacatttatcatagaaataataatattcagatgataaaatgaaaacctaacatctgaatccctgtcttgctgtcatgtaaactaatttactcttgtttgtttgctctaatttacattaatgcatgtttcatagttataactctaagatgtaacaaaaacgtgcatcaatcttgctaaacaatataagaacacttaaggactagcttggtaattctataagcaacttacttattttgatggggatgctggcacaagggacattggttttgcaagtggagagcgatttttcctgtcagtgtgtacactccaactatcaaacctcgtcggtatttctggtggtaccatcatgggagatatcgtcgataacctgcgatgtacagagacagtttttcttctttccaaagccgggcatgaaaaacttccataaggcttggtggtagttggctgtggatgttcaggattggatggggatagtgatggtgctggagctggagctggattaggagcacatgatggaatataactttgtagacatggtgacagccacaaattctcaatcatgccaaatattgggtttaggtcaaggttttttggaattaatttaatgatgatttgggctagttgtttcagtctgtaggtttctagataattgctaggatagtttggggcaattaaaatgtggactgtaacgggcaggttgatcgtcgaaccattttcatttgttatctctacaattaagtcctgcacaaaataaaatgttgtcacttgctgtcaaatacttcctccatttcacagtgtaagactttctagcattgcccacattcatttagatgttaatgaatctagacatacatatgtgtttagattcattaacatctatatgtatgtggataatggtagaaagtcttacattgtgaaagggagggagtaactgactatatcagatgagataagatgtatggacctcatatggtgtcagctgcaatataattctaagctcactctctagctccttgaggtgcacccttagttgttgtatagtcatgttgagtgtgacattgaaaagagctgttgggcatatattgccatcaggtggtggaggcaccgtgatccctcctgggaaccccaagatctccaagcaatgtggatctccaaagacagatgatgtcaaagataaattcgactgctcaagcgtaagttgtatcaagttttttctcagggcaataatggattgtgcacttatggaggaatttcttgggttcggtagaataccaaattttacataagtggaatccttatatttggatgtatgcatagaaaccgaaacctgcaaaattttcagcgatcatttcagtatagcttgagtgcaagacaaattcttttgtcaaagtggaataatggcataccgtagtattggggatccctatttctctgtatatgtccttttgtagccttctgacatgtggaatgagctgttgacgtttctttaacaagaagaagctagcctgaatttcacctggaggaatgataggcgttttcttttgagagatgcataagaggataaaggtaagcttgacacactttatcttcatatttgctgaaagcttagctagcatgagtagctggtatcttctaatctaccactatttgagatcatttggttacgaaatcttttgattctactgtctggattttggggataatgcatctgactttacaaacataattaaatcatgtagcttgtcaatttatatgatcagacggttaatcagtgctgaaagttgctgcagaaggaaagtgttcttaccaggaagtaccccagggtcatcatcagggatggtttctgatgcatggtcatggagaggaagaagcatgaagaggaccagcacgaagacgccgatggagaggaacagcacaaggacacacttggcatcgacagccccgccaatcgtggcggcgtaccggcggacggcggagccgtggccggccgccggcgcagtgctgtgcaccgcttgctcggcgtcaccggccttgcccatggtgagcgcatctgccactggtttttctcaggctcgccagcgtagaaatcatcagagctgagggcatctgcggctgcgtggcgtcgaggagcagctggaaagctggagatggtgctcgccgtcgtcgcaacggcgacgcggacatggtgatatcatcaagagcttgagagttatcagaatactagaatagggatggatacgtgttaggacttgggaattttgggatgtgaatgcttaagtcgttaacagcttaggccggctgtcattggttttctggtttagtttaagaacgtatgaaaattttaatagcaagttagccagcttatgccctctttgtttaggcttataagccaacttataagtcgaaaagtctaagccaaaacaaacaagcagctttttcatttggcttttttaaaccataagccactctaacactattaagccaaaaactaggttggagaagctttttttttggcttatatgagatagatgtataactctaccattaaacttaggacattaaatccactggcttataaatcatataagccaataagctgacttaaaagtctaggccaatcagtctaaagtctaaataaagagggccttagcctctttctgtgatcagatttctgacgatgttgctccggttgttttgactttgcatcattgtgcgtgattcatccgttaacgtgtatttgtcccatacagaaactgtaggttcaggacaaagacatgctagataattggccttctcatatcggtgtttccatctaagccggtttactggtacaaggatcggaccatactatgacacttacatgacatctgtaatagctaaagcaaatggaagaaaaaccaccgcccactaccacataagccacaatttttgcatcccattataagacgatgaatttcttgtaatctatgtcctgaaggcatcaaatattccagggagatttaagttatcacctatttgcaatcataatgcacaacacatctaaactgaaccatggttaaattacataaagtacaagcagctcctcgctagcgtgaagttcgaactaacatgacaaaactgttttccccaatgtaacaacatttgcaattttggagtcacggtacagctcaagcgagctaacctagatgagcttcttcttctggaagtacccttgaaggtgccacaattgcaaaattgaaaccacaatgcagacgcttagtgacaaaatactgaaccaggctaccctagcgtttgttttctcgctcactgttcgcatctctgcttccctgtatgaacaaatcaaataaatcattagatttgccgctaatttaaaatcctgtagggcggtaataaatgtcttcaagttcacataatctcatataacactatgatttcttaaccatataagggcaatgactgggttcaatcgcaacagatcttgaaatataaagtttctcaaagtagaaagcagatctggactgcagatcgtaagttttgtaaacaatgctcgctctttgtggttgaatgtatctagtgctgagaattgaagacaatatgattgtttcattaccacttccaagttccattggcaatctactgaaccctctattagtaccaccaatattcgttttaaagcctcaaccacagtaagtcaatcatgtggaagtaaaacttaccttgctttgagatatatcatgttctgatggatggattgtactgccacttcaagttttctaagctctagttctacaccctacaaaaggaattagattgcagcaattagagaagcagtgaattaaactggacatcagtgaaatatggtcatatggaccgtcagcagtttggctaagcctactcctacctcaattttttccttcttagcgataacatcccaatcctttgctgcaattccaatcttccaatcaagattaatagatattcctgaccctttctctgcgctatctatccagaagcatgcaagatagtttcctgcttctgaagttgtgaatgcgaactgaccaaccgtagcattttcattgtgatgtaaggtgttcccatatggtgatgtaacctgcaccaagcataagcatttgcagaactataacagcacaagtagatagtaattcattcaacaaatcatgtaaaagcaaattgctaagcttctcgaagaaatgctaagcttgagaggattggagtagcatcgtttactccattagtggactgcagtaactgcagattgatactcgcacagtaaaaaaaaaaaaccatattcttgattcgaaagctgcgaaaagaaaaaacataaggactgttcaaaatggagcaaacacaaatagtatgcttagtgtctaatctagccagtactaattcatggatgaaaatagatctcctaatgaattaatattatacttcacataaataaaattacaatcagtggacataaattggagtaaagactaaagaaactagtatatagcgagttgcatggccatttaaccctagtaacccttacaatctactccatccatttgccttggaattggaaattttagtcccatgaagttcctcttgtgcattttcaaggaaaataatattaagaaagagttgagatatcacctgctcacttaagtgggttctacaattaataatttatatgacattaccattatctcacctaagtctatctacttattcaatcttatacggcactcgcaatttatcaaccatatgtctacacgttagtctatttattcagtatgtccccttgtttgttcgaacgcaaaaagcatggcaacacactgtcatattcatgcaaatgattccgaataaaaagatacacatatggtaccaagtcattacagtattaatttcacatcacataataacatgattgcatcgttgtcttctcattatttcgcatcgatgcgattcttattgatcaccttttacttcccacaacccatggagtttcttacagaagtcgctagaaaagcaagtgtgtgattctgtaagatgaatcaccttgtattctgttacgagtgacatcctggacagaaaccaccgcaatttagacagaaggaatcgacgcggtttgtggatcatatgtaagcataccctgcgtcatcaatgcgaatcataccaatccacttgacgcatcagccagttattctagaatactatcatcatcattccctgcgatgcaaatggaatctagacagagcactagatcctagagaacaacaaattcctagcaggttacacaaagaatatatgattccaagtttcagctcccatcgcaatccggtgaacactaggcacaaactttttctgtctttcgcgagcacagctgcaccaataacacataatccctcgcactcaaggactcaaccagttcaacgattattccagcacaatataatgtgcgctaagcatctctaaacccgcagcaaaaccaaaaacttcacgccaccgctccgtttcacggaataatcatccatctatcgttctaccatggagttgacctaattcgtccaaaactaccgcaacctagatcggagcccatccaaaaattccaaaacaacggaagcgcctcactgcatcatagaatccgaagcgagagacggctagaaatgtggggaattaccttgacggcgatggtggggtgggaggaggggtgggactcgtacatgagggcgtagtcggcgagcaccaccacgttggactggatctcctcggacacgcacttggtccccgactgcggcaagtccagccacaccgcctccgcgcagaggaggaggcacgcggccgctatcaccgcggccgcgacagcgagggttagcgccggagatgtagccgccaccgccgccatcccccgacgaccttgggatctccgccgccttgcggggagggggagctggagcagtggcggagtgggagagagcgtgaggaaggcgacggcttgagggactattttgaaattatttacttctgtttaggggtgcccgtgaggtgggctttgtcgggtggtatttggatttagggacttaaactttagggcacccacaatggttatctataagctatctacaagagatccatgtcagcatatttttctacttggaagatattaaatgaagagagagagcaaagctatctactagcttagagatagtctatagagaaaaacgaagcaatgcatgagagagctatagatacctatgtagacatactattgaggtggtttactattaatctagtctattgctgagatgtacatgttttatagagagcaccctactttaccattgcgggtgctcttagtctctgtatttaaacactaatttagagtattaaatatagactacttacgtacataaatgaaagctaatttatctgacaaattttttaagcctaattaatccataattagagaatgtttattgtagtatcacataggctaatcatggattaattaggctcaacagattcgtctcgcgaattagtttaagattatgtatgggttttattaatagactatgtttaacatttataattagtgtccaaacatccgatgtaatagggacttaaaagttttagtcccatctaaacagggtctgacagtactactcactactgtagtgtactactgtggtgggtctatggtaagtgggaccggttcttccatggtgaagacaaatgaaatactccctccgtaaaaaaacgaatttaggactaaatatgacacattataatacaacgaatagagatatatccagtactagcttgttttttagatggatggagtaaggttgagtttcagcggctgcagattctcacacagtggttgttctctttggttgtcatttttagccttattaaagtttgatactccctccatttcaggttataagacttataggttaacatctatataaatgtgggcaatagtagaaagtcttataatatgaaatggatagagtaatgttaaattttggtatattttagcattatcgaaaaagaatagcgttagatatatttggtgccttgtcaaatattgatgatgtttttatgagaggaaacatctagaattatcaaattttggtggagtgataatggtaaggttgtgtttagtttactatcctattaaaatttggtagggtaaaatgacaagcaagtaaacatgcatttaacttagaatctagacaatgagatagtagaagctatctttgtcccacaaaaagaaactcatgcgttcaaatctagatatagcctacctttaaatggtttttttacgaaactggagagtaggaattgacaaacttatattttctaaattcttataaaccagcttcgcatcggctctctaaataagcctgggaattctatcgtcacacctcgtcataccagtaaatattggtgcgttacaataggcattgtaaaaatattgaaatttacaggaattatacttttttcctacagaaaactatataatttctctcgaattatcacagacttataggttctagactccacagtcacactgtactgtgaactaacttatatcatcgcacaaactaatagaacacgtactacgcgcacactttgattcagttgtacacacacactaactttagttaataaagataaacaaattgtcattaataagacaatgaacgagcactaaaagatacggcagaatttggttcatatcccctgctctttaccgtaaagaaatcccaaatatctcccgtgatcccggggatttttttaattagtgctgatgttagtgactaccgatcgatctgccatttccatcatatggtatatgcgacgcacgcacgtcagcatgcgtgtacacccaacacggcctgtcgctcatctacaaaatgatcatcttacgtcgtcatgtcgatccggccccaatgcagctcatatccatatgatgtccaatcaaaatccaaattagttattctctgttttttcagacaattagcaagagatagctaaactatctgctcctagctaggtagctaggtttacgtgtttgattccatagagataattaagataagattgatgaagaagttgagtacagaaggtgactgtttaaaggggccaatccaaaccagttgaactatgtctagctaggatttcaccagtttcagaggacatgttctgttcctatataccagagatagcaatagtcagtcactcactgtgcaaaagtagagatgagaagagaatgtttaggcctgttgatctattgttaaatcaatcgatgtcattcagcacctaatgactttgattagaaaatgtcattcagtaccaaagccaaacatattaaagctagctaaaacggcaggcagagatcacgacatgcacagatcaatcaatgcatgccgttgcatcgatcaaagctataccagcttgcatgtacatttggattccatttcgagtcaattaattagtcgcaaaaagcctgtaattagtggagacacacgccaagagcaaataacggagatggcagtatagcagattagcagtactgtctcgttgacaacacatgcattaagcaaaggcatttgcactatagttaattgacaagtaaattaattgcagctccggccacgtaagacagcagagctagagagaataatatgtgattcattacttaagcaagcacttccggacacgtcctggccttatccattacattgcattatgtgaaaattttaatacctcacaagaattcttaggagaaatcaagaaggaaaagaagaagaagaagaagacgacgaagaagaagaaatcgtgtcacgctctcgatcgatcgatggtcgatcgaaccacaactagcttacaatggactgccgaggatgacggactgctgctgcatgtgcttaggctagtagtgcccgttcgccgccggcggcgtctcgacgtcgtagacatggccgccgttgccgtgcttgctgccgtggccgttgggcaccgccgtcaatggcagctcgccgccgcccttgttgctgcccgccgccgccgcgccggcgtctgtctgctcgactttgtcggcgcccttgccccagatcagcgcgtacagccctatcacgatgatcaccgcgccgatcacgctgcaataattaattaacaaacaaacaaacaaatcaattaattaattaaccaatcgaccgttaattaattattcactctaatcatgattaattactatatatagtataatggggtcgtgtacgaggtagagtagtaccttccaaggttgatttcttccttgagaatgatggagcccatgatggcggtgatgatcatgcagagcgggttgaatgctgtcacgaacactgggcccctctgcctcgacacgatcccctgcacgtagtacgccacgccggagcacacgataccctgcatatccattcacctcatcgtgtcagcgcgcgacagctcgccggcggcgaacaccgccatggctgatcgatcgagcaagagatcgagcttacggcgtagacgcaggtgaagaggcgggtgtcgaagccgatgagccaggcgtgggtgttgtggcgctcggcgacgagggcgacggtgccgctgaggacggagcccatgaggcagatgagcgtggtgagcgacagctcggccgggtaactctgcagggtgttggactggaggacgaagaagcccgaccagcacacgcaggcgacgacgatgaagatggtgccctggaggaacccgccgcccgccgcgccgccggcgccggagccgccgtcgtggtgctgccccttggtccacgggaactgcaccaccgggccgtggtacagcaccatcagcaccgctccggccaccgtgaacagtgtcccggcgatcttcgcctggctgtgcacgctcttcagcttcaccttctccatcctaattaattaattaatcaaccgattcaccattaatctctcgcattccatgctgattaaacgattaatccacatgctaattatatgctaattattgattacctgaggacgagggccatgacgaaggtgacggcggggaggacgttgatgagagcggaggcgaagccggcggatgtcaggttggcccccatgtagtacaggttctgatcaagcacaggcctgacaagtacgtacacgtgtcaggactagagctgaattgcatgtacggtataatcgtattagtattatttgacttgtaattaacttactcaagtatggcgagccccatgatcttcaggaagatgatgagggtcaaccttggtcttactcgcctgtatcaagtaggagcaaataatcagttattaaagccaaccactgattaattaattagctcagttaattaggttattaagctgagattactgaagaaaatgctcatgcagcagttgctagttgcaactctaggagggccctaagaacatgattcaactagctaagtgaacacatatatagctaggccgtcactaaattgatggtgataaaattcggttgattatggtacggttaatatgtaaggtgtcattttctgctttctgtaccgctgctgttcttgtctgggatctatagattctagttggaatatatatgtgcataagctgatttaacgcgtgacattcaagggattaaaagctagctgggaaaagaaagcatacgcgcgcataaatatatacttttcgaatttcgatcggcatatgttaaatttgcagatacataatggaattgacaagctgctttttcatattaggatctggagaagtgcctatcgtggagcatgcatatcatgcaccatcaactctgaaagggactaattaaaacgctacgtcacccggcttatgaacgaacgaacgaacgaacagcagtgctagctatagctagaaatggactactcccatctcttgtgaaaatagaaaaacacgcaagactagctattttcattattcatgcttgttcagagttcagacttcaggcaaacatgtaagctcatgcgtgtgttgtacaaaccacaaacaatgcatggtctatgcttttgcatgcatgcgttctaattaacgatgaaaggaagtttaattaattaaatctagcttgacttagagaaagagattatattagttgatgagctaactaattagctaacagcgctctagtactagttaattaattacctctcgaaccagagggcgaagggcgccatgacggcggtggcgaagaggttacggtagacgacgaggacgaagtggctcatgccgcgcttgagcgaggcgacggccaccacgtacatcccggcgaaccccacctgcagcagtatcatcgccaggtacggcttcgcatcgttcataacccttcctacacccattctctcgaacgatctgatcgacgtctcacacagttaatttctgttgctggtaatctttggctgtagctagtagctagctgcaggagtagctcgcacacaagctgcagctagctaggtgttgtggctgtgatgaggagaggcaatgagttttgagggatatatataggcatatagctgcacgacgctgcactgttcagcacagcagctagcagcaaccgttgctatcgaagttggattagtcgtctcgtctcgcccagatgcccaagtgtggactgtgtggtgccattgatggatcatggatctgactcatgctcccctctctctctctatacttctctctcttctgaatgttgttgttgcgagcagtgctggcttgtatgtttccagcttgtttaatattccacttccggctaaaggagagagagaaagaaagggctatatgtctgcgtcgtctttttaattttctctctgctttgccgggaaaatgcagtgagcacatactgccgatgggttttgcaactttgtcatgtctctttttggctacctgaggagaagaggatgcatgatcagagccgtccaagtcaaggtttgtgggagtcagctggaacttctctgatctgcagctcctaggcttttactacttgtgttaacccctgtctagcagagctagtgcttgtgtaccgacaacaatcgatgtgcatgcatgcatgcattgtacatggatgtgtagagactagagaccagtagggagaatactgtcaatgggttattcgactgataagatgtggcatcaatgctgactagctagttggttgctgctagctactcttatcttcagtttaacttggagtgctaattaattaactgaagattctcagaaaaaccatatataattgttatcttcatttcgtttatataaagagttacactatgctatcacttctgggagatgtgcgacagtgtaatataaaggcatatatatttatatatgggtgtaaccgtgtaacattacaaggagaatggacaatatattcatgataatttaagccacaaattttggtttaaccatacacttatgctcagcttggcctttatgtatcaggtcttacttactacttcctctgtttcatattataattactcattttgaatttggtcaaggtcaaactactttaagattgattaagtttatagataaatatagtaatatttacaacaccaaattagtctcattaaatcaataattgtcacgccccgaactagtcccgaccggaactagcccgtgacgctccaaattaacctgttaatcgataccagtcccaggaaacagtgctggtatcacaggaagacagaatatcacagcaacagaggtctctttattatagagtaggagtacagtcatgttgggctgcggacagatcccgagctcacaactgcattgcaaaagggaagtggaagccaagacttggaccaaacatcacaggcgtgacttgggaactaggccgaaactctaaaactcatcgtagccggcttgctcctggaagaactcctcgtcagcgggatccgcttcatcttcttcagcaactgggggggagatatttatatagagcaagggtgagtacaggagtactcagcaagccatgggaaataagtgtttaatgcaggcttcaaggaaaggctgttgtttttgcaattgattttatttgaactcttttctgaaatcaactaagtgagtgcttctcaaacgacacggatgagacagtgcgtctcgtccggtcggagtatgtgcaaagtatcagtcttttgaattgattcaaggttggcacccggccaacaactttcaaacggccacccgggccaacaactttcaaacggccacccgggcctagctgatcccatcagctgcagattttccaaacatcgatcccatttccacaacagcaatttcacaaggcagtagtcaaacaaaactacgctaggaatcacctcacatccgcccatgaccgtgggcacggctgttcgaacagtttgttaacctctgcagagggggtacactttacccacacgacattactaacccggatcacccagcccgtggggatcagccacgtcgagagacctccaagctttcatgacaaggcatttcgaaagctgacacaggtttaccatatgccgacgagaggggtcccagaccaacaacaggttaggtcccagaccatactgtgccaggaagcccaggggtcctccccgacaccaccccggcgaatccacatgtctctcggcatcaaggctcccctgataagctagttactcagtcaggggtgtcccattccacccatgtggtcgtacttgtcttatgttcggatgaaattccaaggaaacggtccttaagtgcaagagcgggaaaccgtacacccggtacgttccccggtccgcggttttagaaattcatttagttcgcaagcaccgacccaggtgtcgggttttccaagtcttctgtaaaacccaagttttacccaagaagttactcagattttaagtttgaaggcgaccgtcgatactcgcacagagtgcacgaatatcgaggcgcagctagatggttacaagggaacatgatataacaattaacaatggaaggatcagatgcaacaagttgggtaggcccaccggtctgccttgcagacggtgcaaacagattaagtgcaatcctatcaatgcataatattttgcgagcaatataattaagttcaaatataggctcaatatgttcaaaggtggcttgccttgctcgagatcttgagcttgatcctcgaaatcctcgcactgcgggtcttcgggctccgaaactacacgcaaaacgggacgactcaacaaacggcgaaaataaagccctattaatgacctctaagcgtgccattagatagatctcgagatttgaggaattttggaagttgaacggagtcaaacggatttacggttgggaagatatcgaatttctaagatttttggatttttggtctaaaggaaaaaggatttaattaaatcctttttgaaaaagaaaagaaaagaaaagggaaagggggagggaaattagacttctctcgggcggctagggcgcggcccgagagaaagggcggctcggccgagcttaatgggccggccggcccaagaaggcggctcagagcgcgcgcgcgggaggggaggagagagggagccggtggaccgggctcacctcgcgtggtcccgagtgggacccgcttgtcggtgacacggttcaccgtgcggaacacgcacgcggcgcgtgctagggtttgggggagggacgcggtgcacgcgcgcggttcgcggaggacgcggatgtggcgggcccacgtgcagcctcacggctcgcggtggaccgcgcgcacgggaagggcctgatcggggtcggctcgacccggtcttggccgagctagcgccgacgtggcgcctacgtggctgccacgcgggccggcgggaggtagacgacgatgccagccggaacggacggcggacgacagcggtgagcggcggagcgaaccacggcgataccggcgaaagcgagcacaccgggtggctgcacaggacgaggggagacgagccaacggctcggattcgccggagggagcttgtcggcggcgaattgcggcggcggcaaccggcggagagaaaaggggaaaacggcgatgaggtcacgaggggccgattcccggcggcgagagcatccacgcggctacgggaatccgtcccttgcgccggattaggaggaaacgcatcgagggaggccggcgacgagaggcgcttccgagctcgggcggcgacggcggcgagcacacggcgagcgacggcaacggtcggggcggcgccggctaactacggggaggctactcgtgctactacccgagtctaaggggaggagatggaacgaggaggaagaacggagggaggcactaccgtgcgggcgggcgcagtgacgagaggccgacggcgcgggagtgatctctccggcctcgggccggggaagaggaagaagacgagcgcccggagtccccttccgcgtccacgaacgcaccggctctcccggtgcttggcgatgaacggcggaggcgagacaaaggggcggcaatggcgtggtggcggcgagcgaaacgggaggaggaatcgatgggagggcgccttggtttataggacgacgatgtcggtttggaaaccgaccttgagcggtcaaggcgcgagctggcgctcggcgctcgcggccaaaacggcgacagaggcggaggatgacgccggcgggaggaaaaaggggaaaaggagggagagaaagggggcttgcccccttgcctctttgggaaaaggaggaggggagcgggggcgacgcggcagagggaggaggggctctgcctccgtcccttggcagcttgcgcgcggagtggcgggggccgggcgatgatgacggcgatgacggcggggcggtttggagcggggcgacgacacgggtggcaggcgcggacaggcgcggcagaggctgacggcggcggcgaccaggcggtcggccaccacggcacgtgcgcgcgggaagcaacgggcggcgcggtgatttgagcggcgctgctcgggcacgcggggctggatgacgcagacggcgcaggcgcggcacgggcggcgaccgcgcgggcgcgcgcacgcgaacaacggcgcgcgggaagtggcagcgtgggagcggagagggagggctcggctcggcgcggctcacgcgcacgcgcgcgcggcgcgcgggcagagcggagaagagggagagagagatagcgagagcgagagagagagagagatagccggggagggagggggagatgggccgagagagattcggcccatcgaacctgagggaggcgaaacagacttttgcggagggattgatttgggaaggatttggattcgggattgaactcgacgatagatcggggatttgagatctgagatggcacggacactagacagcaagcaaagaaacagatttcgcaaatagggtttttaagagatagttttcccgctatgtgccacgacggaacgggcgctacaataattgaatatatttttataatatatttgtcttgggttaaaaatgttactacttttttctacaaaattgatcaaacttgaagtagttgactttaaccaaagtcaaaacgacttgaggggtatacaacatggatttttattctatgctatgcccgactatccgtacattgcaatgggctcatgcagggatggattacgcatgctcatggtatccaaccatttgttttaaccaaccatttttctctgattttctttttaaccaaccatttttttcctagttttaagggtagggcggtcgtgtgtgcaacgtaaggggaggaaggagggcgactacgttttatagtagtagaaaccatgccaaatatatcaaataagagaaaagattacaaccgtgttttacaacatcagaaaatataaaacctagcaaatagagcatcttagattgccaaaagacatgtaagtagacgagcacatccataacgttgaccaaccccggtacgtgcaaaagcatatgaacgagcattggtcgccatcttcattcttttgacaggtcaataaaccagtatcaccaaaggagtctacaactcgaaccttgaatcaagtgtcgctagttggatcaccagcagacacctagattttcatcaaggttcacacaaacaaataaggcatcaacaaagagagataacaaaaaccaagatactctaaacgtatctaaaccgtagacgaaagacacctaaattgtctaatagatttaaacctcatccactttgttttaaaaaaccctaaaatcatagttactccataaggacaagagacatatacctttctaacatatttgcttgcctctcgacgccattgagaatgccgcaaaggagaaaggggatagtagagatggtgcatgaagagatcctcgagagtcgttagatgcaggagactcgccacatgaaagacttatgttttctattttgtgagcatatagcatgatgttttgcttgtcatattacatcaaattaatgatcttagccattagactacttatatcttggtcatttttctcaagcgtaaccatatgcgcacaacatactcacggacaccaaccacactctcccacatctaaacaagattagaggccttgcctctcataacgcaagaacaccactttaccactgaacataatcatgtgtgtatgtagccatgcatactttacgagattagattaattataaaaaatacgagcattgtatgcaagtttaagtttgagatttgaattcacgtggataggttccactatatagaccctaatcgatcgagctatcttcactcctcgctcggtcattctttttaattaaaagagtgcaagacacatcacttaggaaaccacgatagacctgcaccctgtttcaacaagtgaaccctatcaaaaccataaataaaaaggcacgtatttttttttgaagatatgtagttccgacacataggagcgagtaactatccatggtgcatacatcattcatgcacagctcccctctaaccccctttctcttctccctcattttaacccaaagatacgatcgatcaagcaacaagcaatcagggctctgagatttgcattggatcgcgagtgtgatgatctcagcgcatgagaggggcaccaaacctaatggaagcaatcagggcgtctctccggccggcccatgcaagctagcatagcagctagtgcttgctgatgtgccaagtgcttccatgccggcatggtgcgctccaaacaggatttgcatccatccatccgtgcgtgcgtgcgtgcatgcatccatcgcctctcttctcacctcgcgacccacggaaaatagtaccgctaggctttaagcctttaacttcatctgttgatctcgtagagtccgaaagttatacttttcttactagtgttttgagctctaccgtgtttacagcagcatatcgactgcaaccaaagttgaaatattaaatattaaaatatagagctaattttatttttttatcgtagtttattttttacatcggcttttaagtcgttagaataatatattttctctgttttttaattagatgacgccattaatttttaacacatgtttaaccatttatcttattaaaaaattttatacaaatatataataaataaatcatgattaaaatactctgagtgataaaaacaactcataacaaaataaattataattacataatttttttaataaaacgaatggttaaacgtgtgacaaaaagatcgttatctattaaaaacagaggtagtatgtaaacaatttcactcataattttcttaatagatattataaaatattgtcgtctttgtctctctctctctcatcagctgcatgcaactgaatgtatcctttcctggaaagtaatttggttgcttaccctagtcatcacaaaagcacctggttaattacgtagcatccggtttggtaataaaaaccaatgactcaatgaggaatccgtaagtggtacagtacaagattacgaggtggttaaagggacgggagtgtttaattaggttgacacacgattagtgagtggcctccagcgtccactacgtacgtgtttctgcatatctgcacgaaaagctaggcacaaagaaccttctgatcggtcgatcgatgagctctgcgtcagaattctatctaatccctcttgcgctcgcggcttcggttctctctgtctttcagcctgtcatccaattcgatcgcaacctaggctagctgctactggttgctgctgcctggtaggcacaagccaagatgaacttgtacacccactactataaaaatttacaacatgaaagttgccatgtccagtggtatatacactggacaatgtcttttgttcctggttgggatgagcagggttccaataactgttgggtaaaagaccagtttggccccagaaatatattcatatattcattgtctgaaaatgagataattgctttaaaaaaattccataatccagtactctatataagatggactgcttgttaatatatatactttccacacttgaggatctgatagagggagacagcccaaatacattgtaaaaacttgaattggaaaaaaaggtacaaatagataatacaaacttgacccctgatctttttgttaccatcttccaattgaaaaagggtacaaatggatgatgcaatttaaaatttgtgtgagtcgatggtaaaagactccaatcttccaagtttatcctcaaaactgacttccaaacaggtattcaaaaccaagattatcttcacttgaacaacaagaactagggagctgcctagctctgactcactgccactttgtggagtcattagacatagtttgatccagtgatgagcatatgctctcctttttttggccgcggcggccagccggcgagacgcggcgcctgacaaaagcaaaaggagatgaatatggacatgggcgtatcttcccagcaatccgatcctcctgccgtgcgtggcacatcatcatacattccacaacgacctccgctgcacctctgatgagctgattcggccatgaatcagacgcactgaaatgtttatctctctctctgaaggtcaggtcaatatccaggagaaattaagggaaagggaaataattacatacccaagccaagttagtgccatggtgcgcatgcagctagtttcatccaaagcagtgggctgatgaagccattagagctgagtagtttattagtcagctactgatatagccaagttgccatcgttgtgtgatgctccctgtagaacgacagtgtcttctctcttctttatgcagctgcagttccaatacatggacatcactgaaacaacaatttttttttgcgaacgccactgaaacaacaataacaagttaacaaccacaactgaagaacagaaacactatgaattgttaaatatgcatgggatggtttctgttggccggcattgtatattagaatgtttaatggaggtaatgctgttgttaaccttcattcttgcaaaagaaaagggttaatgctaaccttgtcacatgaggttaacagagagccaacaaatattcaattgaaatccaatgcttacatgcagaaggtgatgtcatttgcagcaatgatttgaggcttttgagatgctatattagattaagctattgcgtacattcttgcacatttcgagttcttggccacttctatcatgcgttctagaatatctgcgtttgctttgccttcacgaaaatgccccttttgttggaaaggagaaaaggattcatccttctttgctgcatcttatccgttggacatacaattagcttatctaagcagatacgctgcttaattcattattgtaatttataaatgaatgataaagtacatcaggtttggttctttacctgaaatcagctctctaatattttcagttcagaaggctgcacactttgaaatttactaatacatcccaactgtttatttttttttaaaaaaaagcaatagttcaatttagtggcttatttagttatagttgatactctgttgtcgcaatttatattctcttactgattaggcattagagttaagaaaaatactactccaaattttcttcgctgattgctccgaaaaacaatttcctgacttcagagtcaaccagcaccgagactaatgcactttgccaaaattcttcaagagtcggttgatagtggaaaccatactgcaaaaagattaaaaaaggtaatatttatagtatttcatctttttgaacaaagtactagaacaatattatgggagtgaagctatccactagtatagaatctcaaaaaatcataaattgagacttagcccatgatgtcatctactattatctgtctgtttcatcattgtaattgtacagtacagtctagataagatgccatcatcataattaagcatcagttctgtattacttacaaaaaaatggtacgaagttgcatgtgaataagttcagaatatcattgttgtatttttagttgagactatgacaatcttcaaaaaagaaaaaaaaaagactatgggctgtaatattcattaatcaatattacagtttaggcataaagattttcagcgtcaagttttgtccccaggccactgaggccagcagatggggccctttttcgtcaaggaaatccagttctacagaatttcaggtggagagatcaaggagcctcattatttgaaatcataaagatattccaagcgattcagtagtataatgcagaagcttctttagggaaacaccaatcaaactgccaaaaaaaataaaaataaataaatcacaaatcatgtattcatgttccagctgaaacctctctaaggctgtgtttgaggagaatgagatagagaagattgggaagatacgcaaaacgaggtgagcccttagcgtgtgattaattgattattaactattttaaacttaaaaaatagattaatatgattttttaaagcaactttcctatagaaaatttttacaaaaaacaaaaggtttagtagttcgggaagtgtgcgcgcggaatatgaaacaaactcactccctttattctccaaacgaacgcagcctaagaaaagtacttaataagtcgttcacatgttctgatcaagcacatatcaaactaaagactgattttgccagtccacctactgcgcttaaaaagttggttttgttgctaactgttcagctgaaaataggatgataaatgattgctggtaaccatatcaagcatttcccaagaaaccaatcatgccatgtcaaacagacacagaaaaggtctcatcatgtgcttcccctctatcatctggaagtcgtttggcatagtaattgggacatggaatagactggcctagctgcttaccatcttcttcatagggaagacctacatgctgaccatgccctacacaagtttcagacaagcctccctctgcggcgcacatccaagctctctacatgcttgcgaaacagcgaaaggcaatcaccaactcacaagatccgatcttacggtggccggacattgatggacacatgaagaacacgatgcgtccttgccagctaggggtccattccaattggctctggtgacactgacagtgacaccaaaacgcccttctgctttagcaagtagccacaaatccacgatgttttgccatctgagtgaggtacattagttcctccatcttccaccatggttggaaatctacccattctatggaggcatcattctattctataataattcttctaaatcagttcaaatccaacctcgaaaacatcataagaactagaatagggctagtaataatttagatcccagagaaggcaagcacgattgcacgaatacaagtaggtaattaagcaacagaggagcaatttggataagcagtagaaaaaaaaacaggattatatttttgggtacctgaggcgccaaaagaagaatcggcggcggcggcggcgcttgcatctcctgcatcgccgtcgccggcaaggctttggctgcgagttgcggcttctccgatccccatattcccgagaaatttcagtattaaccatccaatacgataacctttaaagaattgccacccaatacgttggcctttcaagatctaccaccagacacgcgaaattcttcatttcgtgccattccgtctgcttgtccgcgtcgtccgtctttgtcttcgtctccgagctcgtcggccgtcgtctcaaggcttgaccatcatccctgagctcactcccgtcgcggttgccagcgagagacattgcaccttcgacagggacgaaagagcacatggttttgtcgacgtctagatggtagacggggacggagtttgcggacatggcggttcaacagcagaacacgaactcaggggcgacggcgacaatgatcggatgagagcttgggcatggcggcaacagcggaaagctcgggggcgacggcggcgacagcggaacgtgagctctggggcgacgacggcggcaacagaacgcgagcttgggggtgactacggcggcgaccggacgcgagctcaggcatggcggcaacggcggaacggaatgcgagctcgacgacagtggcagacgagctcagggacggcggcgatagggcgcgagcatagcaacagcgctgaacgagcttggggatgggaatggtggcgatggaggttgggaacggcggtggcgacggtgccgaacgagcttggggatggggacggcggcgggggcgggatgcgaggtgacgatgaccgtgcctgggcgacgacgccacctagctcggagacagtcgcgcggatggacggcggggcaggcggacggagtggctccaaataaagaatttcgcgtgcctggtggtaaattttgaaaggccaacgtattgagtggcagctccttaaaggtcatcgtattggatgataaatactgaaatttctcccatattcccagttggaacggtaaattctacaaagtacgaggactaatatgcaaagagttatctttttctccttccaagccgatctgtaccgtccgccaacacaacggtaatacgagatcatacgagggcttttctgcaaaaactccacaatggcccgagggaaaccctccatctggtcgtttattttcgatcgaacggtgtacatcgccaccgggagccccatttggatcgccagaattggtagtgatcgtgtcaagaggtgggccggagtaattcacacatggtccgggccttatccttcacgaagagaaccgggtgatctggcccggcccaaacaccactcgcgatctatccgcacttgtctgcgactgcgaccacatcacgggggtgggcccacctggtcaggctagctaccacgcgagccgcaagtacccatcgcctcgtcatccggagagactagctcccactttccagtctcccgccgccgccgccgctgttcactccgcaccaactccgacgatcccccggcgagctctcgacgatggcgacggcggcgacggcgtcggctacggcggccacccgcttcacgcggctggcgggggtcgggctccggcgcacggcccgcctccccacggccgtgcggttccagcgccgggtgctcgccaccaccgcgctcctcaggaccgccgagctccggcccaaggagcagggcctgcccgagacgctcgactaccgcgtgttcctcgtcgacggcgggggccgcaaggtgtcgccgtggcacgacgtgcccctgcgcgcaggcgacggggtgttccacttcgtcgtggagatccccaaggagagcagcgccaagatggaggtcgccaccgacgagtcattcacccccatcaagcaggacaccaagaagggcaacctccgatactacccgtaaggactagaaactgaggaaattcgtattctgaatgtctaagtttatgttcgtttctgctgaaaatattgcgtcttttgtgttaaaattggacgagcgacttgcaaatcgaggatataacggccgtttaatttaactgggaattccttctgagatcttcactccacaagtggatgccatgattagtttgcaaatgtaacattttcttttgtgtccatgcttgttcgtgtttgagaattctagaaatccttaatgttgttgcatgagttttgtttatttaatcctatcctgtttgtttaggatgtcgcatcttcttttattaataattttagtgtattagtgagttttttttttttgccgggtcggccgaaagattcggtcgaccaaatttcattaagaatgggggaagttgtattagagagtttaattggtctgtttcaattgttgtatcaattgttgataggttggtctttaaggatagaatagcaactcttttcataccagaaattcatgctttacaatatttgttgtgggctggggaaataatgtaggagattgtgttttttatgtggtgctctttcgtgggaccttacttcagtgtgaaaaagatgggctgcttgaattttgtcaatatcagactgtagctgccaccaccttgtgcacttttgggattccataaaagaacattttgttctcccatgtttggcggtggaatcacacaaggtataatgtggccatcttagatatagcagatctttacaaagatgtgatgttaattgaactagctggatttccacacagttttgcacagagctaggctaaagtttattcgaaagcagagttggattttatgtataactgttgtttctgtttctatacattcaattttattttgtatacaactatatcaatcaatctacactttataatttggacaaaccatgataaacaactgcgtagatcttactctttttattcagttaatatggtaattttctaggaccttggagcgaatgcggtgactcttgttagccttctctttatcatataatagatttagctgacctgctcttgtcatcaaaactgtgctacaagaaggtttgaatttcgtctgctttcaagttcaaccttgcagtcatggttctgtataatttttcttaatcaaaacaatgctaggctgttctgttacttccatttcagtccttttgaaaaggattagtgtacatattttgtggacaggttccttttccgccttatagctggtatcaaccttgcagtgtgaaacttgcttgttggcaagcaattgattttatgctgttactggccttgttgatgaacattgtgcatcttgtccttgctgaccctgtttatgaactttgtgcatgacccatcatggaattatctggtatatcaggtacaacattaattggaattatggattatttccccaaacatgggaggacccaactcttgcaaacaccgatgtcgaaggagcatttggggataatgatcctggtaataaacatttcggtgtcattgtatttggtagatatggctcatatatcatcttcagccactctgaccaatcttgctgatggccttctttccagttgatgttgttgagattggtgaaagacgtgctaacattggagatgttcttaaggtaaaaccgttggcagctttagcaatgattgatgagggtgagcttgactggaaaattgtggctatttctttggatgatcctaaagcatctcttgtgaatgatgtggatgatgttgagaagcattttccggtatgactgatgcctgcctttatttttagtgtttgtccttgttctccactgattggcattgcctatctcgttgatagaatgtaggctttttttcccttagattatgacaaatgttttctgttttgaattctgaccttggctaagcattttttaaaagcaaaacatattttagcaaacttaccttttattcataacatgagaaaaagacagatgtgttactcttgccataattattatcctagattcctagttgcgcacatccttttctaaatgactactgcattaccctgaagctttttttttgctgaggttattaggttttttcgcttggaagttttgattagttttgcatttaaaatatgttacatgggcagggttaaaaatgttgctaatgcagttagttttcaccccctctatattttacaattgctttgtccgacattttacattacctattcagggaacattgactgccatcagagactggttcagggactacaagataccagacggtaagcctgcaaacagatttggtctgggcaacaaacccacaagcaaggtaagcctggactccttcagttatatttaaacatagaggatatttttgcattctgattgtataattctctctcctaggaatatgctctgaaggtcatagaagaaaccaacgaatcatgggagaaattggtgaaaaggaatatccctgctggagagctctcactagcctaatcttgtccatgagaagccatcagattcttttggtcatttacctaagcatgttgttttcataagctataagcatgctgcttcttgcgaactctttggtgacctgtgtgcaacaggaacagcttgtggagtgaataaggctttctgagctagtttttctaagggaattgggtgttcttgagcagcgattgtgtttggaacaagctttacaaagtgaacaatcagtttagaagttgaatgataagcaaatatagtttcaacattgtaatcattaaccaagatggcctaattgttttttaccacaccatgtagtaaatatcgaaatgctgaccccttacacttgaaaatgcactaatatgacagatacagaagttagcatacgatttacaaacaggttaagccactaaatcattttcacatctaaatctgacgggagaacggccaaagcaaccgttatgaacctaaattatttgatacagtcgaaaatgagttccacttgattcttggcctcgtcaatcatcaaccgagtacaatgcttcgaccagccaatacaaaaggcattgcagatatatgtaccctggcctcgtcaatcatcaaccgagtacaatgcttcgaccagccaatacaaaaggcattgcagatatatgtaccctggcctcgtcaatcatcaaccgagtacaatgcttcgaccagccaatacaaaaggcattgcagatatatgtacccagacccagctctatctaaaccaccatcttgtacctgcaaaacggacgttggtaagtgtcagttcagtttgtgaacaatgtgactgactgcaaggtaagtgtcagttcagtttgtgaacaatgtgactgactgcaaataaggtaaattgagatcctgagagcaatgaagtttgataagattcttttcaacggtagtgcaccaaacatagaaaagctgcattgagctgctgagctcaacaaatttgactaccgcagtaatacccttatacccagcaagcaccaggtacttcgctatataaaagatacccaacagatatgcctaaacatcaaacattctataattctatcaaataagaacaaaaattcagcaaaaaagggaaacacagtacatcctatgaatgaagatatatgtagatatagtcatatagatataatgcatcacgtctccatgatgttaaacaaagctgatcagatcgttaataaagtttggcaatgaggctggcaaaaatcaatagccggttcttccattaaaaagaaaactgaggtagtgctctaacgctctgaagagacgaaataataatcaactttgctataggtgtcaaacgaagcattcagctgcatgcagcatgcctattaaaggaccttggtgctcagtacttaaatgttcctttcaacaccctgttatgtactactccactaattagtatatgaccttcctcatctaattctcgatcactataggttacttcaaatatgttatctcttagtcatcaatctcatatgtaatagctcgtgtctaatatttcgtagatgtatctctctgataattttgtttccctaaccaagcagaattcaaaatttcaggtgcacatatctatatctggtctttcaggtgcccatgagatagccaagtagcagagccagaaaatatatcctgtggccctgtggggtcaattattgctagtccatatcttagtggggtcatttcttcttctctctttttacccttttttttttggacaactgtacggcttatgtgtttactcctgccaaagccaagagaccaacataagaaaatacatggcagaattctctatgccatggacttgatttggcaatcacatactttattggagaagttttttctaaattcaaacagttttatttgaagtagcttaaaaacctgggtttgtgacctctcacaaattcattttctgatacacctcaaggaaaaaagtattagcaaagatactctgttggcttggttgttggttttgacaacttaattgagatcatcatcatcatatggcttatagcatgtgctgtatttggttattagatgtgtatgaagttatgcataatttattgtgtgtcatctccaaattctcctttcacgctactattccatctccaaaatccaaactatccagtcagagacacaatatacatactagtagtgcataaaaactggggtgttgcagccatttaggattggcatggttgatttctggctttgctcaaggttgatgcaaagaatatgtaaagcaagtatgaaacatgaaattctctaggcttttttgaccacagaaaccaaaatcaagctgatattgcttgcttcctgattataagactgttacttccatcatgctatgggaagcataattgcttaatacttcgatctgtggtgtgctgatggagaaaaatagcttctttgctactttgtgaacagacgacagaccacacaatcgtgttatcctttttggtaaaataccccaacagtcagcaagaacaatcaattgccgagtaatagattgtataagttctactgtaattgaacgaacgagcaatgcgttaacgaattctccagcgagaagttggactagggaaggaaatggcagagtttggataaattactcgtgtagatgacagtcatacccgagctaaggcccgagggccttgatggcgtccatgagcaaggcgtagacctccttggccagatcatgtcgccgcatctgcgtttgtatctctgaatcaagctgcctcctccacttgccctcgatgaatcttgcttcctctgtccctagcagtgacaaccccttcgccagggacacactggacagcgctcgcccatccgtcttccagtactcatcaagcatctcagtcagcacaggcagcatggcggcggcgtccgggacagtgcgcggctggtcggcggcggcggcggcggcggcggcggcggccctttcgtcgtcgccctcagcaaggggctcgaggtcggcgccccagacgctcgcgcagaggtcgcgcacgcggcgttcgtgcggtcccgcggacgcgccgggcgccgcgtgcaggtacttgcccttgagccgcttcagcttgtagtacaccttggcctggtcgatgtgcggggagagggagcccctgatggagtcgaagagcgcgcccatgtccgggaggcgcgggacgtggccggcgcgcgcgcggaaggcggcggcgccggcgaggagcgcgacctcgtcggcgtcgccccagagcttctggacggcgcccccgtgctgccccccggcggcgggcgcggtcaccgcggcggggtccgcgaacgcgccgcgctgcctgcgcttgcgctcgcgctcgcggctgcgggaggaggcgggcgcggcggcggcggggggcgggctagggttgggggccgggtggcgcgcggcgtcgcccgcgcggggcttggggcgggacgagcgcttcttcgacgacctgggaggggatggcgaggcgggcgcggcgcccgcgtccatggcgctctgggacggccgcttggatggcatccgcgcggcgcggcgcggcacggcacggtgcggcgcggcgtggcgtgggtgcgctctggatgcgcttgcggcctcggcctctgtggggagagagcttggaaattggaatgctcgatctggctgcacactgtgcgctctgtatacggatgcctgatggttttcaggccttcgggggagagtgtgtgtgcgccgtgcgcgtcaacccgatttggccgtggccgtcgtctctgatgatctgatctgcatctactagtatattcgccgtgctgtgagtcgctttttctgctggctgtccttttgaaataaggccttgcatagataaaaaaaaattagcaaaaaacgtcacattaaatatttggccacatatatgaggcattaaatgtataaaaaaaccaattgtacggtttacatgtaaattgcgagacaaatcttttaagtctaattacgtcatgatttgacaatgtggtgctacagtaaacatttgctaatgatagattaattaggcttaataaatttgtctcacattttacaggcggaatctgtaatttgttttgttattagtctacgtttaatactttaaatgtgcatccgtatacttcaaaaactttacgcctaaagaactaaacgcaccctaaaaactatttgacagcactgtgtagtttgtagcttgggcctctttattctccaatctccatcctctttgtaatggtgaatggtgtgtatatttcaccatttctgttaggtgtgcattagtacattgaaaaggctagatacattggaggaagtgaatctggtatacacatgactttatacctctcatcatctatactactactagaacacttgattttagaaagtaatgagtataattttccttgatatccctacgactaggctggaagctaagatatcggtacaattttcctcaggtcacaagatagcgtacggataacactgcgtgaaagggtgactagaaaactagttggtaggttggactggctaggaaatgacgtgtggttgtcgacccgctagaggctagccatgggaaggttgctcgggtctagtatgtggcaacgcgcctagctcgagaccattcacgggaagattgctcggaggcgacagttcaggggccaatgcgtccatctcatggtcattcgcgggaggattgctcgaggacgcgaatggttggtcgcgtgggcgccctcggtgggggatcacatgaccacgctctaacaacaggtacaaatgaagcgtgcaatagctcgctcccatcattccacattaattaggcatgctcaccgcaagtcaaaggtatttaatgtagggatttggtgtatcacgcctcacccctcatgtctcctttctctccatctgaccaagctataccgtcagggggaggcctagtcacttctatggtagacctgtggaaggtggcatcttgtagcatggaagaattataagtggtggatggtatgatagcgggtacggtgtaggtaatgatgtatgactatagtacctttgtcagttatcccatggtgattaggtagattgtgggagagtatataacttataagcaccagatagatcaccgagtgaaaggttcaactctcctagatacacaagaacacaacacgtagaagttgtacgagctctggacttagccagttctaacacacctccggtgcaaaaagttgtccagatattaatcaagaaagcaagaatataactatcatctctcgagaggcgcgaaaacctgggtaaatcaagtgtgtatgagcttgtttagtgctaaaatatgcgatcatagcttttgaccccatctccgaacaccaagtttttcggatcctatttgcccacactaggacacttagaaactagttttataaaggtaaggttttcttactaggacacttgattttattcaagttacaatatgttttatcaagtgcaaacttatcaaattacgtgttttataaatgttttcttacttaggacacttgattttcttcaaattacaatgccacataaatcagggataaatgagaaaaacacatcaattatcgtgggtgaaaaagcaaacccttatatggtccatagccaaggcatgtctatgccatgttgggttatctttgtgtttttttaggtgaaagtgaatggaacttagtgggccttagcatcaagcttaatgccattatttttgtgacctaaggtcaaattcacttataaccatgggcccataactttacaatatggtaacattataatatttaccataatatgaagttggtatatacacctacagctgtaggtcaataatatccggtaaatgcagaaatatttgtctatgctctattgtatcgacaaacaatctccttagtgagcatagcaggaaaggtagaaacgacaagaatgtccaaatatccagtaaatgtagtacgtgaattattgtcgtttactaagactggtacgataaacgctatgttgcatgcatgtatgcttgcacgctggaaaacaaaatggcatgcaagagagtgtgagtgattttggagcttatctcgtaatgttatatgataaatttgataaagatcggataaaaatacatgtcatgtttattttggcatatttgtgaaggtgtccatttaaaaagttataattgactcgcaaagtttcatctattttttttgtcaaaactatatacggtcaagtggaaaagaaactatattccaaattaaatgttacctaacccaatcatcttcatcctttaccaactcccttataaaatcgttatcttaaccatgcatagttcattaaaccgtcaacttcattgaaacttctccgctaaaaaaactctgtagattcttgaaactcattcattaccgcaacgtatttattactgtttttaaaccaaatatcaccacaatgtaaatttcattttacttgcaccgcactctatttcgaagttacttcgatacctcacgttattgctagcgtgaagaggacggtgagtaaaggtgcctgccggtagtagtagtataacaaacccaacgagaagagcagcagagcatatgctgcgtgcctcccgtgcaaaaccgaacccgtgtcctgacgccgcgagcctctcccagccccgcccctctctcccatcggatccgagcgagactgacgcggaaaaatcgggccggaaaggagtcgaaggaagaacagacgcgaaggagacactcttcaatactcgggctcgcggaacgaagccctagcgccctagccctagccctagctccgccccccggtcctccgccgccgtccctcctcgccggaggccctacccccgacccccgccgtgttccgcgggggcctcggcggcgatgcccccttccctggccgaggctttatgagcggcggccgccgcggggagatggcccgcgccgagggcttgccggagggggccgccccgggcgtcggggtggacctgtacgcgcaggccaggaaggccctgtcggtgcggacgccgttcgagggcgaggggacggcgcctagggttcccacgctgcccgcgcggctcgtgaactggtcggggcagagcgacgcgcggaagaagcacaagaagattcagccccaggacgtggctgatgtggagctcccgccgcagccagccacggagccctctgcgaagactggcgtgtgggagcagttcgaggcgtatttccggccggtgaatttggatgatattgatatgttaatgccaaagtttccgttcggctatggcgggctcgattcgtgcatcctcataccatttgtgggcagtggcaaggaattgatggacacagctgagacatttgatgtggctgtggctgaaacaagctcgtacttgggtctgggtggtgaagaaagagtcagtaacaaggagcatagcgaacggagtgagcgaagtgagcaaagtgttgagcaaggcatacatgaggtgattgtgcgacagttcgttggtaacaaggaacgcggtgagcagagtgtagagcagggcatacatgaggtggttgtgcaacaggagaattggccattggaagtggagcaagctactagcagtgctggcattgtatcatcaaaatgtgaagaagagggagaatcatcactgaattggttgctaggatcaaaggaacggtttgtgctcacttcagaacggcccaacaagaagaggaagcttttaggtgtggatgcagggttagagcagcttgttctgctaccgcgctcgggagctgaggctagttctgtatgtgatgtttgttgtttgggggagagtagtacggtgtccaatagcatgctcaattgcaaccgctgtaaggtaactgtgcaccagaagtgttatggtttgcatgttgtgcctgatggccagtggttgtgcacttggtgtaaggatttggagtcactgcagtcgttgaagaaagatgcggacaacaccttgtcgatgccttgtgttctatgcccaaaagagaaaggcgctctaaaacctgtcaaaggggagcctggtcaaacagcgcatggggggaaccttaaatttgtgcacttgttttgtagcctttggacaccgggagctcttgtggaagacatggaatcaatggaacctgttactaatgttggaagtgtccaggagaatcagtggaaattggtgtgcagcatttgcaaggttaagcatggtgtatgtgtccgatgtagtcatggtatgtattttaccctatgtctccattttactattttagttagatgaactatatgtatatatacatttaagttatttagaatcagtgttttgcagataatttttcttgcacacttccattttgtaccaccgcatagaatttccctgcatcatgcttctactgcggtctcgagtttcttaagaccgagtcattgcttatttttttttcctttcttcaatgtgggccttcaaaagcaacctttaaatttgcctttgaactggaagatatgtagcaactttatcggtctattcaatgaaaaaccgcaaatatgctgtcactcaggtttacctgaggaggtaattctaaatcaggtgttgcacggtagcacaaaattcttgctaaaatagctgggcagtaggtgtgtttggttccttggctacccttgctaatgcacaatgaaatcattgctaggagaggagagctgaattgtcttttcatcaaaaaatggggaacactgacttgtgtgtccattaccaaaccaagcaaggcaacccagtttccttgtccactgaccttgctagataaggatgagcaaagctaccaaacatgccatttatctcatttctggtgataactttccaaaggaagtaatcctcatctgaatggatgactttgctcaactcattaactcaacgtagtttgtggcagaagtattgctacaccatacaatgatggaatattgctggcaaagataattctatgtttggcatgcgggaatttggtagaatggtactttttcatgcaataaataatgggtttacattgttacctttgttggctttatttaaatatttttcgtatatatagtaaaaagaaatgtgtatacagatatccattttagttctctacatgccaggttatcttgtaagttgtaactgcattttacatgacagcatatcaaaatgataactgggttctagtccaaccagttactatgctgctgttaatgatggataactgcatattagttagttatacctatacccttgtataacttttttgcaattaataactgaaccaacttttggggccacacacattttgtggctggttcactgaaaaactgtccactttggccagggttttacttgttcaagtcaggctaactgcttgaatgatccaacagcgtgccagactggctgggatctggtccctttttttcctttttggactgccaggccggtctggttctgataagtgtggtttacattatgtattttttgcgaacagatacataaaaccatacatttctcaatgtatgcgaacatccataatatccatttttgaagagaaattggaaaacgccatcgtaaagatatgcaaatagcaaaataccatcacatgtgagaatgacacatagggcatgggcctatatatattattgccacatatgataatattttccaactctctgatttttgtgatggtgccaagtatttgaccctttgtcaaaaaacattgcaggaagcataatatgcttttaatcataatttcacccttaattgacttatgccatatccacagacttcaaaaaaaggctgctaagaacaatgtaataagtaatactgagaacccaggctttaaagtttagttcacaatataattacaaaattatgtattttaagacactaagtacatgtgagttgacatattaagtcttagctgtgaagatggagtaagcagtgaattatatattaaactattgttcatatataatattttgtaggatagaagcattctatgatttgaattatctttgatattttctgtcagttttggtggcacttaaaactagcatcacatttttttaagtcctttaactagttatccatgtggttttcaggaacatgccgaacaccttttcatcctatatgtgcacgagagtccaagcatcaaatggagatatggggaaaatttgggtatcctaatgtgagatcattttcttcaggtgtttgccattagccttatttaggtcgctgttgttcaacttgtttgttttccatgtaggtcgagctgagagcattttgctcaaagcattctactattggatatgccaattctctagagagaagtaactgtgcatctcaccagagtcctacagaagcaaggctaaaagatgcaaaccttatcactggaaaggtaccaaaactaagattcacgcgcaagaacaaggataaattcatgaactatgaagccactagctttaactctagtaaccttatcaaagtagagaccatagagcaagcctctttaccccacactgttagaagttcagattccctagcaatccaagggatggaagtggatactgacaatctctcggttggtgggaaccttatgagaaactctgctgatgttgctcttgttcttagaaaggtaatttctactctggcaaagctcagttaggactctgatatttactacgtaacccatgccaaggaaagaaacattaatttctgtactgtattttagctaattgatcaaggaaaggttagtgttggtgatgtagcatctgaagtgggtatttcttcagaatctttggaagctgctcttgtggtacgttcatactatatgtttactatgccaatttgtttataagctactttgtcttttttttttgagaggatataaactacttttgctaatgatctgtttgtcagggtgaaaccaccactttttcccatggtctgaaactgaaaattatcaagtggctccaaaattctgcacatataccagctgctcaggcaaagattcttaaagggggcccaatggtggtgcataatagcaaaccaggcaggtctgaggatacaaatagtgtaaacatgaagaattcattggttccgaatgatgagaaaggaacaacagcttacttgtcagattctgctgtgatgaaatcctcatcaacaagatctaaagataataacaagattatgagggataacacagctgtctgtgcaactggagtaacaacccttttgcagaatggaataaaaaagatggctgaagcaggcgctgagcgtgagtgttcttcccctgctgaagattgtgctaaaggtactccaaaggaagagcatggaggattggtaagatttattacttttaatgattctgtacacatgctcatacacgcatgcacgcacgcacatgtgccaatttgggaagtggaagatcattgctacatttatggacagccaactattgtttgcacgaatgatcaaattataatcttattacctacaacttggcaatgaaagtgttctctactggcagcgaataactggcacaagcatttaaagtagtgagtagaggccactttcattgtcagtgttgcaatctatacttttctgccagctgtcaggtgagactataatttgctcattcatgcaaacgatagttggtctgtaaatgtagcaacgattttccacttccccaattagtctctcttgtgtatgtgcgcgtgttgggtgcgtgtgcgcgtgcctgacatggaaacacttgcattccatttatactggttacacagcaatacttgccttaataattttatcgctaagtgttcaactaaaaaaatattaaaaacaaactggtgaatttatcattattttattatcttaaggaactaaatctttcatcataaatactatctgactcccatccttgtgacagatatcgaacaacatctctggcaatacacaatttggaacttccatggcgataccaaatgaaaataaaggtaaaatatgatgaagtatctccctctgccttttcgtctctctgtgtaatcggtacaatttctggactgtaaaatacattttgattgtttgatggcctatccttttgttctcttttgcattagttactggaagttcaatttactgttggtaattgttcatccacaatcagaattaggaaaaaaaaattaaaattccacaaagccgcaaaaaacttaaatagcctgaaaagagattgcacaacattttctctgtaatgctgcatcagctctgaatgctatttgtagttgtgctagattgactgcttttatcagaatgtagtgcctactaactttgtaaattttcttagttagttagcttacttggaatatttatatgttgatggttgtaaatttgcaagtgttgatttaacactatttatatgtttattgctaaccatttaaaatattgccactctttagtggttagttaagagtcaaggtatgtgtgctgttattattattggtaatactgaatttgttgacttgtgagatgtgatagggctggtctgttcctctatatctatctgttttgtcgcaggcatttaagggccatagtgtatgccttctcaatttcttctgtttatgttctggtttatgggcatttacggctatttggatgtcttctcaatttcgtctcacttggatagctgttgctgcaatgctatctggcaatgcatttgccctttcttcagatatcattccctttcttccattatccggtcatttgtttgcctttttttagttcttacaatatgttattacaggtacatctcctggaaagaaaagatataacttaactgaggctgaacctggctcggagctggagggtgtctcttcattgaatcaatattttcctccaggtgataatgtaaaacatgagttaaacttggttgaaaatggtgttgggaataaccatgattgcaacgcagatcatgttcctggacagcccttttccaagtaagacgaaagaaatttcaaccaattgaattatagttgttcttctatggttttacttcccttctttgtttaatgtgacccccttccttattttctttttctgcatgctctctggaagatcttaactgctgttttgctgtgtgcagcttcaatgattcacactattatatccatccactcatcaaggaaaagatgactcagctttgggacaacacgttcaagcaagataagctggcaccatgtcaccctggtaaagttttaagggcttgtcctagctaactacttaacgtacattcataatacaattttttttgctatgatgtaattaaatctgttttctgtccaaatatcaccagaagatccgttatgttatcccgatgagagaaggcgtgtgggttcctcgataaaacttacagaaacaacagatgtgatggatcaagtttcaagagcaaaatccttgggtatccttgagcactcacctgatgatgaagtagaaggggaaatgctgtacttgcaagccaggctacttgacactgctgcctttctgaagcacagatatggtaaaatatactgtggttgtttattctttgtattttttatggaataatcaaactttttatgtttcctctattgcttgtttacttcttcaatggacctttgcttgaacagtgtacaatactgtctatatgatgaatttattgtttcttcagttttctgaaccacttggcttcttaatctcgcagaagatttaatagcaaaggttgtccagaatctctctcgtgagttggatgctttcagtaggagaaaatgggattttatttttgtcaatcagtttctccgtgatgttagagaagctaagaaacgtgggagaaaagagaagagacataaagaagcccaggccattctggctgcagctgcagctgcagttgtggcctcctcacgtaactcaactgtgagaaaagatgccaatgatgatgtagtacctgctaagcaagaggtttattgttgtactttgattggtcaattaacaaattcttattcttgcataggctatgtttcttatttcttttgtacctgtagaattctccaaaatttggcactggacctccaaacgttggccagcggacttcttcactactacgactcaaggatttgtcaaagccacccaacaacaaaatttcacaagataataaccgcagcacttttcatatgccaaattattccaaagaaaatgcactatactgtgatgtatgcatgcgaagtgagactgtgttgaaccggatatttgtctgctccagatgcaaggtgtttatttgtattttattgaattctgaagtcttatggtactcccttgtgttactaattctgacatgttcaacaggctgcagtccacataggttgctatagaaatattgagaatatttctggcccctggaagtgtgaactttgcgaagatatttcaccagaagacacttgtgttggtgatcaatcagattgcaatggcacaaacctgtccttagtgcagtgtgatctgtgccatggcacatcaggtgcatttagaaagactgcagatggacagtggattcatgctttctgtgctgaggtatttaaatgagtattatatttggttttcatgtgactcatcttgtgatatctaatatttctaatgctttcttagtggttgttggagactgagtatgtgaggggacaagatagtccagtcaaaggaatggtagtcttctatacccaacattacatttatccctttttcaattttaggaactcataggatcgtctcaactgcgtttattgtttgcacaattagaagctgaggttgtttgtcagtgttggcatatcatcttatattgcatcatcttgatgcttggctatttgatgcatttatcaggaaagtcttgtaaaggacaaagatacttgctgtgtctgccttcatactgttggcgcatgtctaaaggtacatcataatctttgctctttcttctagttcaatgcatgatgaaaccaaccatttggaatcttgataagtttgtctttttctaccattcagtgcaataatggggactgccaaaccacttttcatccttattgtgctagacatgctggtttctacatgaacacaaaaggatctggtggtattttgcaacacaaggcatattgtagcaaacacagcatagagcaaaaggaggtgagtgtattagtttaacatagaaactgttctggaatgatgagcctcttctttcctacctaagatcaggattctctactaatgctgtagataatctttcattatgataggaaatgaaattagtcaattgccttctcattttagcattgtgacacttaaacaaaagaaaggggggtggatgagggttcatataatcctatatccggtttgaaggctttggttgcatattctcattttccttccgatataatcggaaagggagcatgtgatgcatgagtagatggaaatcctgtgttggtacaattattttctgtaatcttattttgttattcgaaattgatgcaggctgatatgcaacagtatggacttgaggagttcaacaacatgaaaagaatgagggttcgtatatatgatgcatttcacttttcctattttgatctgtgatacaatatttttgttcagttactatctaaggtttctaacttccagtgcatcaaatcctgtgttccctcacttcctctttcttctagaggccctgttaatttttttttgtatttctataagtaatatttgtttttgtatttcttttttgtacttcaaacaatccttgaggaaatgtctgaaggatgtccattctcattgaacattgattaaatgatccctcaatccctgatgaaatatttacattacaattttgcaggttgagttggaaaaattgcgactcttgtgcgagaggataattaagagagaaaaggtgaaggtatgtgtggcccctacttatactttttgctttgtttcttaaaattgaactatatgaggaagctactttaagccctgtttggagaaactacctttgaccttgtgttttttcctctttgtgaatcaccttttgtttccttcatattaataggtgaaaatcttgcttgagttactcatttagtactccttccgtttcataatgtaagactttctagcattgttcatattcatatagatgttaatgaatctagacacacatgtatatcttgattcattaacatctatatgaatgtggttaatgctagaaagtcttacattatgaaacggaggaagtatatattatttgctagaaagtcaattttgaagagatatttggacgtgttactagtattttatcatgaaaaagaaaagcccagataaatacaccctcaattaacaaatccatatggttttgtgcacgtgaatgctatttcaaccattaatccactaaaatctactgctgagtgttgagattattttcttttttatacatcagatttgtcttgatatttccgtgtgtaaaccttaaaataatttatgcagcgtgagagggttctatgtgatcatgacatacttgccaaaacgaaggatactcttgttttctcctaccttacacatggagcaagttcagaatctgccactacttctgttaacaacaaatcatacagtggaaccatgcaaaggtctgatgatgtcacagtggacagtactatttctgggaaaaaggcgatcaggttttctctgaataacagggatgctgagataaacacagctgatagctcaaggacactgatatcgttcaaacggaagtttagtgaaagaggatcacttgctggtaagcagctcccgcgaagaccagttacctcacagaaattggaagctggagaaaagaagacgaaggataagaaggtttgtacttctgttttcaggttttttacttcttttctgtaccttgctaatgtgtagaccacatggtttttcagaatagggaaacatttcaaaaggagctttttatgacatctgatcaagcttctacacagaaccaacgtcttccgaaggggtatgcatatgttcctcgtgactctctttctaaagacaagttgcggaatcgaaatacacaggcccatgaaccacaagagcctggtggataggagcagctgagatcaagatggttaatcttgtctcaagaaaggccagaagacgtttgtttccttggtcttcacagccagaaagtacaagcgtcaagtggggctggccagtcttttgctgctacaaagggttccaagcaaacgatgatccaattgggctgaagttgtagaacggtgcaaactgagttaatgtgaacgagagaacgaaacagatgaatgtatggtgtgggatctttaccagaaatcttgctccgcctcaggtcgctcgggtgaacggcaacatgggtggatttacctgtttgaggatatacaaagatgcctttctcgcctgtacatataaattctctgtaatttctttgtacattcttgcctttgcgtgtgatagtttagcgttgcagaagtgatagtttagctttgcagaagacaaaaaaagaaataaccactctttgttgggattacaagaaaagaaatggtccattggtgcgagtcagggccaccgcggggctgataatcgctcaagggattggagacaggcaattggtaatggctaatgaggtctgattcattgctgcctgttgggatggagacggcgaaagcagttgaaatggaactgttggtttacagcagccattttaatggtgaagtggtgatagctggtatagttttagatacagcagtacagtctgaccctgttcttttttatgttgattggttgcgggtgacttgctcggagcttgttaacaaccatttaatatttcagcaaacaagaggtttttgttttaatgactagtaataacttagtctggtgtggtagtcagcttttttatatgttagatgcagataattttttagtctgagacaggtgttttcctcttgccgtccagatttgtaacttgggttaataatctttcctaccattgggagccacacagacgatgtaaaaaaacattttctaaagattttagtggtacttatgttcatttgttgtatgcttggaccggaccccaagtacctggtgtatatttccaaatattgatttgtcattaattgtacgcatttgcatttttgttttttagtcgtcggaaagctgagcttaaggctgccgatatagtaaaccgttgtatgacgtactgcacgtaataatgctgctgtccagtactcatgttactgtattgcaatattggtatgcgttcagtattgcgtttgcttatgtcacccactcctatttcggtacgccagtgtcctgcctacttgtcataggcttgtttagactcaattttttcttcgaacttctaatttttccgtcacgtcaaatgtttggacatatgtatgaagcactaaatatagacgaacaaaactaatcgcacagtttgtatgtaaatcgcgagatgaatcttttgagcctaattacgctatgatttgataatgtgatgctacagtaaacatttgttaatgacggattaattaggattaatagattcgtctcgcagtttacgggcggaatctgtaatttgttttattattagtttacgtttaatatttcaaatgtgtgtccgtatacttaaaaaatttttagcacaggaactaaacacatactgatgtactacatgagggttcatacaagatttaacttgtaaatttttggggatttaactcgaatgatttagctggtcattactactacctccgtctcaatttaagtgcaattatggatttttgtgttcgttatttcaaaaatttatgagcaaacttttttaaaaaatagtcacacctaaagtactatttatgttttatcatctgataacaataaaaatattaatcataatttctttaaataagacatatggtcaaacgttaataataaccaagacaaacctatactcttttttggatgaatgtagggctataatttgcggccgttctttaaatttttggagtcatcgtagcaataacagtttttttcctctacggcgttgatgtttagacgcgtcccagcagatatgggcacgtcgcaaaaatcactgtcataggaccttacacttactttttagagtacagttccctttcccaatgtgtaccttgtccccttatatacagaatacagtactgctactactatttctccctcgattaaccgttcttccacggttaattatcacttggatggaaccaccgattagtacatgctcgagaaacgcaatgcacagtaacatgtaagcatgatacgctcgtagtcatagagcattcaggtggtgtttaaaatagattaagatgaagacaaagtcagtgtatacaaaataaaaaaactatttgcacataattaattgagttttatttattaaaacatgtaaaaaaatatttgatattttaaagcaacttctatatagaaagaagcataccgtttaaccgtttaaaaatgtgctaatgaaaatcatgaaaaaaatttacattttaatagaaaataaatggggagagatatattgataaataagaattagatgctcctctactattgttgacaggtgatacccgtagacctattatgagggtatcagggtacgctggagtaggatctacacaatacgatatcaaacacacagaatacaaagattatactggttcagacccctcgtaaggtgataggcttaatccagtttatatgagattatgaagaaaaccacagaaattaagagaacaatagaaccgacgagtaccgattagacctttgtcgagattaactcgacgagattaaccggcggcttggctccgagtcctccgaattgattctgctatgcccggttgtgagattatgattcgatgatcccgtatccttgagagctttgtatttatacccctaagtgtcttggccttcaaatagaacttggagaataccttacgcgtacgagatcacagagtccgcaactccttcgaatatgactataacaccttatatttggaaagacagttttcttatatatctgctgaattccttaggactaagataactttcccgtatattcgagggtatatcatatctgtacactgcacaaccccaaggatactgaggtatgtcttattcataccctgataactactagataataatcattgtgaaactagtaaaaaagtagcactgagtaatatgcttgctgattacacaaatatgaacaaataaataaagctatttacagagtcgacagaaaagaactacttcctccgtccttaaaaaaaacctaattctaaatttgaaccaggttcaaatctagaattgtgtttgtttttggactgagggagtaggttggaatcatctggctcgtagtcgtaggagggtgaggactaaccaacattttattgataggcttcacgttaatttctctactctgttcagccttgctgtacagatcagtacccgtgcaggggcgtgaaaaaccgccgcgagatatactagcaggcaataaacagagccacaatgtcagctagcgaaggcaacgacgactcgttgcaggcttgcagccatccggccacgacacgacagtatacggcacgaagccgagccgaccagcaaaaatatcgatcgggacgaatgagcatccgtgatacggtggtagtactgtgacaggccatgtcggtgtggtgcgcggcgcacgcgatgcgaccccccaactccaacttgaccgacccttcgaaaagccaccaccgccgcatctccaaccgatcgaccgaatcctgttgttgcagccgcgcgaggcgccgtcttttgcagggaaaatcgcacgcacacacacacgcactgatatctccaggcttctctgcttctagacggtcgcgtcgactcctgtttttctgtcccttttcgccggggagatttcgagccgcccgtctcacgggagcctctcttctcctctcttgcattgcatatttgcctgtacggccctacgttgcgtctcgtcgttccctaccagcactgggtcaaaagcgcaacaaaaggccagtaccctcattcaggcagcttgggtcggcagctactagcttggaccaatgaacagtgctgattgctgaccaatcatccagcgaattgttgcttttggaaaaagaaccggaaggaggaggaggaatatttgctcctgtacatgtgctatctccctcgacgatgtacgtgccaggagcagggcggcgagggagagcgattcgatccgcgagtggctcgggctcggcgtgtggctgggctccgataccccacgttgctttcacctccaaagcgcggattattcggtgccctgctgctgcatgcggttgttcgattgatcgatcgatcgatcgatctgcttcgatcgttctgatgatcctgcagggtctcggtgaccacgacattgcgatcattgcaatctagttgttgttgttgttgttgtgcggttcgagatgatggatgggacgggagccgtgccctgcaccggggggaagtggagatcgatcgaagccggtagcttagctttctttcgcttgcaagctagtatagcacgcaggagaggaagagaagagaaaagaagaggatggagatagatcatagatgcccacgcgctagctcgagattttcttgttgacctcttgaccccggccatcctcgaatggcccggcactttctgccggctttgtgttttgcatggagtttgctgctttactcgtacggcactttgctttgtgcgcttggcgcctaatcatgagcgtatcgatcttattgctgtcccctggagttaatcacgccagttgtgctaatccaagtgtgtcttgatctctcctcgctttgttagttgtaggataattaacaataactactaaaatgaactggagtttctagctaggatatcatgtacgtcctgattggttactctaaagggtagctatctgaaggggacgaagttgattgcaggcccttcccacttaccatggtaggtcactttttttttttcatgtgtggtgatcgagcgagccaaacaagtaccaaagcaggtgtactccgtcacctcgtgacaaactcgcaaagctccattttgtgcacttttcctttacgaaattattattatacactatcttgtgagcactgataaaaagtcgatcgagcatcgtactatcgatcaccaacgtacagcggatatctgctcgcaatgccatcgccatcctcctcctttgttagtttagctttttctcctttttttttcttcgaagaatttagttgagcctttcgtcgttgtaccgacaaagccaacgtggcaagaggctgcggggccggcatgcacgggcgaaatcgaatgatgggtgcctccacgtccaccgatcgacgcgtcttgagcggttgagccccgtacggcttccgcaccgcacaggaggggatcgatcgatcgatcgcgcgtgcactcccgttcctatcaacgacaacgggagccgggcgggagcaaaggcgaaacaccgtgtggcgcccgccccgggagcggagcgcgcaccaccaccaccaccacctatacctcgctgtcagcttgccaacggagagagggggctcgcgctcgcgacggccacacgcgcgatcccgcgtccatccacccatccatcatccaccatccccaccgtggtgccgtgccatcgcctccgccttatcgtctccgcgcgcgagcgcgcgatcacgttacgtagtactacgtcgctcgctcgcgtgggggcggctgcggcgttgcgttgagttgcggcgaggcgaggcgaggcgtggtggaatcacgcaaccgttcggtacacccatcgggcgtttcgcggacggggggagcagacgttgggtctgtttagagagcttctagcagctgcagcttcttctagaatctccagttaccagaagctctcccaaacagtatagttttttttacctagattatgagaatatgtgcttgtagaatctggaaaataaactagaagccagaagctaagtttttcagtttcttcagattttcaccagctagtttctcagcagttgtttctcaaaatcttaagctcactaaacaggcccgttctcgtagaccgtggtggtggtggggggaggaggattacaatggatgatgccgcgccagatgccaagcgcaatagggcacgtatgcggggtggccaccggacaggtgagatggcttggtggtgacgcgaccgtggccatgttcgtgggtcgggtggcgtttggctgttcgggtgcacaacggccgggatttttctcccctgttggtttgcccttttttctcggggggcctgcagagcttgatagaccctagatagctgtttgtgaatagcgaaagtggcaacaaaaggagaataaaagaggatatgtatacagtcttgtgctggtgcatgtttgatttgcatgctaattttagttattgatgtagtagtaatattgaggccaattaatcagggttgtatagtgtacatagctttgtgtgggaaatcatttatttgaagtaaaatgtactccctccatcaaaaagtttaagatatattttattttctggttttttaaatgagataaacatatttgtagtttctatgtgctaaactaaattatcgaccaatacctgaaaagctatcttaatagtcattggttgcatgcgtataatttctttcgttttgtcacatggtgtatgagttaatttctatttagtttttagtgacaaaagaaaaatatgtcttatggctggtttggcaacttgaggaaaaatgattggaagtttagatgagggaattgatggtgagattaacatgtgaatttgatttttagtcacaattttatttttgatagaggtggtgggaattgacaaggagtttagttggtgactagattttaaatgaaaatggatggctaagatttatttaggcaacgtaaaggagaaatttcctatcaattactagcccctacccaaatattaaaaaggagggagatcttccctcaattccccatcccatcccacgaaaactcatttgtctctcaaccaaatagaatagttaataacctcatccttttaaacttctaatctctcataaaaactcaccccaaccaaatacacccttagacttttggatgaagggattacataactacaaccattttaactaaacgatcgtaaaattacaaatttaaggtattttatcacaaaactatagatttagtaccaaatttataataaaactacaaatttaatgttgagtatcataaaagtatagatttaatatcgaagaagtcatcaaaaaattataacctttattagagtttaaatccataacactacatttatgttggagctataaatggcgtagttttgtggttaacttggtactaaatttatagttttatgataatttagctacttaatgtatagttttataatacaacactttaaatatgtagttttatgatagtttggtcgaaatatttgtagtgtgaataagctattttttcaaagaggatgcccccttgtttttacatgtcacgaaaacgccataaaaattgaaaaaaaattgatagatatatgatatatatcactctacaaatctaaattcgacctatacaagcaggaaaaaaacaaatacgattgttgatagtgcacattgttaaattcaccgtgggtttttgtgtagcatactcttacatgcccaccatgaagatccaacattagcatctatagcatgagtcgacaagagaagtccatactcatattggaagatatactttcaatttttctttttttacaaaagtatacttttttaaagagaaacgtatatactagtactaaacttgctgttatcaccaatcatatattcgaagttttgccatcaaaaccacagttagccgtggttttacagtaagcatgcaaggcgtgcatgcatgccttcttgtattttaatcgattgcttcattatttatcttctaaagttgataccagtaaaaaaaggtacacgttacttttgtagctaaaggttagtttaacatatatagaccagtatcctcatgaaagggagctgatacgaaaaccatgtattgcattataaagtttatgttctgaaaaggggccaactaaaaaaaaagaatcaacacgtttgcatcgatgacctataatttatcatgttaactttagaaaaagaaatatgtacgcagtatattgtgatggtctagactatataacattataaattaattagtgaataaattatagtctggaccacttatatttttcaagttttttattttgaaccaccatttataccatattttcactttaaactagtaattttatctttgttgtgattttgttaacagtgaaatttggtaatcggcaacgacgtcatcgggttagaatcattatcggctgcagcatctcgccgatgggagttatcaagtcgccaatagtcggattcctgctatattcggttaaggaaatcaatctactaaaggaagcttatccctaagtgaccgagtttaaagaggatgcggcatgacagtttatctattaattaggaatagtttgttagtttccttttatctttaggaaagtgtgtttagtgtctgataaggactttatattttccttttatctttaggttagtttctttcttgtccgacaaggacttgtatcaacccatgggtataaatatgtacacccggggtctatgtaatctatctccacgattaatacaattcggcgcatcgccaccccttttaccttttctaccttattttatcatccggcgggacttggcacccgacgcggggctgcatcggtgttcgatctccagcgaaggggtaagtccaatgtttcgccggtccgagcaattgtatcgtctacgtcggcgtcgttcaaggctgcatcagtacattcgacctcttggattgctctgatttggatgatatatttgcctacctatttatcatatgtctctgttaatctagtcttagcatatcaatttacctctatcggctgcttctcgctttagggtttctgccggtatcggctaaatcgtgttgctagattagattagcttagatatctaccaccctaaaaatcagttaacggcttgattgtctagatattatgtttcttttcatacttagtgctgcatcagttaagtttgatctactaagtcgtgtttagaaccataatctctagcttgcttcttgattgccaataagggtttcatcggggtttcagccgatgagttatgtggacgttgcatcggcttacaaggattgcatacatattggatttagtcgatcgtaacaaaggtttcattgtttaatccaatcttgtggattttatgacattggacctccagccgatgtatgctttaaccttcggatcaatgcttattctatcatattgtattgatagccgattggtttataccggattatattgttgtcgtattttattatcatcagtcgattgccgttatatcattatctacatttgacatatagcccattgcttaaaccctatcactatcggctggtatcggcatcggctattatcggctatttgctggaactactccatcggcttgtcagtcgattggctattttgatatactatttgcatatcttgtcagttgcaggatcaaactgactggcacgctcgcatctcatcatatttggacccgcactggagctaagcagatctcctaggctgcaggcccagtttatttgcaaggaggtgtctttccaaattatcggcctttgatcactgatgcccagccatctatttaggcagtttcccccatcgcaccatcagctcagctgacggcgccggcatcgactcccttacctgctccgtcagcattggcactaggccagctggtgaactctcggttgttaatgagagagcaaccacagcatgtgggcaggttgcgaatcggctgacgcaagatcaggttgctgccatgtttctgccgcctcaacctgctgttgatccaatacaacagcaaccgattcaacagacactcccaatttagcaggttgtacaaccaatccagcaacaagttgtgcaatcagtttagcaaacgttaccaaggcaacagcctccgcggccgattcagcagacgccattaagacagcaaatcggtcagccgattcagcaccaaggctcaatgagcgcatcggccgggcttgtgacgcctggtggacagcctatacaacaatttttaaatcaagtcgtcacagaacacttggttcaccacgtatagccagatgacacagtaatgcctcaagttgttcccgagcatttggcacgtaatattcaaccgatccttcataattaccagggggggcaacttgaattatcaatatcagtctccttccccgcaagcccaatatcagccagggggactggctcaacctcagtttgcatctcagtatggtcagttcgagcccatgcaacaacagtcacagggaacagctcagcaacgaccgtgggccaatgtgattgctgatgtaatgagggaacggtttgggcttaaaccaaaagagactggaagcttgtaccggcagccttacactgagtggtttgagagagttcctctccccaatcggttcaaagttccggacttctctaaattttcgagacaagatggtgtgtcaacttatgagcacattagccgatttttagctcagtgtggtgaagcatcggctgtggacgctctgagggttaggttgttccagttatctttatctggatcggcttttacttggttttcttctctgccgtatgggtcgatcaatagttgggccgatttggagaagcaattccacagctatttctacagtggggttcatgagatgaagttatctgacttgacggcgattaagcagcggcatgatgaacctgtgcacgagtatattcagagattcagggagatgaggaacaaatgctttagcttgagtttaactgacgctcagttagccgatttggcctttcagggtatgattgctccgattagggagaaattctcgtctgaagactttgatagcttgtcacatctgatacaaaaggtaaccttgcacgagcataggtctgcggaggctagaaaaagctctaagaaggttaatcatgtttgtccttacatgtatgggtcggatgacgatgaggatgattctgaaatagctgcagccaaatgggtgagaagtaaaaaggtcataccgtgccaatgggtaaagagttctggaaagaaagagaagtatgattttgatattactaaagctgacaagatttttgatctgctactccgagagaagcaaattcaactccctgttggtcatacgattccatcggctgaggaattaggcaaaaagagatattgcaaatggcataattctaggtcccattctactaacgattgcaaggtttttagacaacagattcaggtggacattgagggaggcaagattaagtttgatggttccaaaaagccgatgagggtcgatggtaacccatttcccgttaacatggtacacacagctgaccgaacagctgatacggggcgcatgagggattatcaagtaagttcagctagaattataaacaaatatcaaagaaaatacgacaagcaacaggaaaggcatcatgaagaagataatggtggctttgatccttattggggctgtgagttcttcaggttctgttggaatgaaggtatgagactaccatctatcgaggattgtcctggatgcagtgatgttgcagggggttcaagccgattgtacgatagaggcaatcgaccaaaacagacaagagtacctgttcatcaaagattgggcccagtaaaccaacgtggtgattcggaagatgatgaaaataggaagactcaatggtgtccttctggtatttttacgaagaattagaaaagaagggttcaaagattgaggagtagggaacgcttccaagaggtcgagcaagaaattgatcatcggctgaagaaagcaaaaccgaggcaggagtggcgtgttaagaatcaggctcctgtagccgatgatgttgcagccgatgaggcaaagaggttggcaaaaggaaagagtattgtgacggcaccagttaacatggtttttaccttgccagcagaattcgggatcgatcaagccgatgtcgacgaggtggaagaggaatcggctaagttggttctatcaccagaacatgcggtgttcgagaagcctgaggggacagagaatcagcatcttaaaccattgtatataaatggctatgtcaatgggaagctgatgtctaaaatgatggttgatggtggggccgcggtaaatttgatgccttatgctacgttcaggaagttgggtagaaatgccgaggatctcatcaagacaaatatggtgctcaaggactttggtggcaatccatcggaaaccaaaggtgttctaaatgtggagctgacagtcggcagtaagactattcctaccacgtttttttgtcattgatgggaagggttcttacagctagttgcttggaagggattggattcacgccaattgttgtattccttcaactatgcatcaatgcttgattcagtggcaaggcgacaaaatagagatcgtaccagccgacatgtcagttaatgttgccagtgccgatttagctctttgggagatggatggccttgattgtttatctggaaaagtttgggatggagattttctaaaagtgtccgattctgatatacagccagttgaagatggagaacccaagctattattttgagggtgtcgtggagggttcaaatgtctacactaaggatacggtagatgatctcgatgacaagcaaggtcaaggttttatgtcggccgatgatttggaagaaatagatatacgtccaggtgatcggccaaggccgacatttattagtaagaatttgtatccagaatttagaaccaagctgatagagctcttaaaagagtttagagattgcttcgcttgggagtattatgagatgcctggactcagccgatcaattgtagaacatcggctacctatcaaaccaggggttaggccgcaccagcagcctccgaggagatgcaaagccgatatgcttgaacctatcaaggctgagattaagcgtttatatgatgctggttttattcgtccttgccgatatgctgagtgggtttctagcatagttcctgtcatcaagaagaacggcaaggtgagggtatgcattgattttagagatctgaataaagctacaccgaaagatgaatatccaatgccagtagccgatcagctggttgatgctgcgtcagggaacaaaattttgagttttatggatggaaacgcagggtataatcaaagttttatggctgatgaagatatccataagacagattttagatgtcctggtgcaatcggcttatttgaatgggttgttatgactttcggcttgaagagtgctggagctacatatcaacgggccatgaattatatttatcatgatctaatcggctggctggttgaggtctatattgatgatatggttgttaaatctaaggaaataaaagaccacatagccgatttaagaaaagtttttgagaggaccaggaaatatggcttgaagatgaatccgataaagtgtgcttttggtgtatcggctagccagttcctgggatttcttgtccatgagaggggaattgagataactcaaagaagtatcaatgcgatcaaaaagattaagcccccgggaaacaagaccgaattgcaggagatgatcggcaagattaatattgttcgaaggtttatttctaatttgtccggaaaattagaaccttttacaccattgttgagattgaaggccgatcaacaatttatttggggggcagagcagtaaaaggctttggataatattaaaggatacctgagttcccctcctgttttgattcctccacagaaagggataccttttagattgtatctgtcagccggtgagaagccaatcggctcagtcttgattcaggagttggatggaaaagaacgagttgtattttatctcagtcgtcggctcttggatgcagagactagatattctcctgtggagaagttatgcttgtgtttatatttttcatgcacgaggttaaggcattatttactatccaatgaatgtactattatatgcaaggccgacgttgttagatacatgttatcggctccaatattgaaaggaagggttggaaattggatattttccttaactgagtttgatcttcggtatgagtcaccgaaggcgattaagggacaagctatagccgattttatcgtggaacatcgtgatgattcaatcggctcagttgaaatggtgccatggactttattctttgatggatcggtgtgtactcatggttgtggtatcggcctagttataatttcccctagggggcatgtttcaagtttgcttatactattaaaccttatgcgactaataatcaagctgagtatgaagcagtgcttaaagggttgcaattgctcaaggaagttgaagctgatgctattgaaatcatgggggattctttgctggtaatcagtcaattggcaggggactatgaatgcaagaatgatacattaatggtttataatgagaagtgccaagaactgatgaagaaatttcggctggttactttaaagcatgtatctcgagaacaaaatattgaagctaatgatttggcccaaggggcatcggggtataagccgatgatcaaagatgttaaggttgaaattgcagcaataacagccgatgattggagatatgatgtgcatcaatatttacataatccatctcaatcggcttctaggaaattaaaatataaggcgttgaagtacactctattggatgatgagctttattatcggatgattgatggagtgttacttaagtgtttgagtgccgatcaggctaaagttgcaatcggcgaagttcatgaaggaatttgtggcactcaccaatcggcccataagatgaattggttacttcggcgtgcagggtatttttggccgacaatgctagaggattgcttcagatattataaggggtgtcaagattgtcagaagtttgggacaattcaacgagtgccgacgtcggctatgaatcctattattaaaccgtggccattcagaggttggggaattgatatgatcggtatgataaacccaccatcaagtaaaaggcataagtttatattggtggcgactgattatttcaccaagtgggcggaggccattcctttgaagaaagttgattctagggatgcaattcaatttgttcaagaacatataatctaccgatttggtattcctcaaactattacatctgatcaaggttcaatcttcgtgtccgatgagtttgttcagtttgccgatagcgtgggtatcaaattgttgaattcttcaccatattatgcacaagctaatgggcaggccgaggcatctaacaagagcttgatcaaattaattaagcggaagatttctgattatcctcggtaatggcatacccggttggccgaagcattgtggttttatcggatggcttgccatggatcaattcaagttcctccttataagcttgtttttggacatgaagctgttttgccatgggaagttagaatcggctctagaaggatagaattgcaagacagtttgacagctgatgagtattataaccttatggccgatgagagggaggacttggttcaatcgcgtttatgagcccttgctaaggttaccaaagataaggaacgagttgctaggcattataacaagaaagtagtgccaaggatttttcgaaaggtgaacttgtatggaagttgattttgccgattggaactcgggataacaagttcggcaagtggtcaccaaattgggaaggactgtttcaaatctataaggttgtgtctaaaggggcatatatgttgcaagggcttgatggtgaggtttatggacgagcgctcaatggcaaatacttgaagaagtattacccaagtgtttgggttgacgcatgatcggctagtgttgctgatgcatgacagccgatgtgttttacatcgtcttgagatggccgatattgttatatcgcccttagtcgtttttctaattgtaatcggttatggtttgccgatatataacggccgatattgttatatcgcccttagtcgtttttccaattgtcatcggttatggtttgccgatatataacgaccgatattgttatatcgcccttagttgtttttctaattttatcaatgctgttgacattataaaattggggggcacatatatacaaaaaatgaaagtgaaaattagaagttatgttattcggcacaaaggattgttaaaacagcagggtattaaggtatcttagccgattacaggaatttctaagtcctattacacaaaagttattgagacaagtactgctggatagccaaaatagctctttgcctaatgtgttcgacttcttcaatggcttgggcatcttgagcatcagttccagaaatgaccttcagggacttggttaggtcagcaacattcttgatagccgatttgagccttgctttttgctcttcgacagattttgagagatcggctagctttttgtgctccatatccaattcagcattgcattcttcaagctgtgctaagagatcgatcttgcgggcttcaagccaatcggtattggatttgatcggaccttcggataggtgatcgagtttgactttttcttcatgcacaagctgccgattgacctggattgtggcttcaatctccttgcgttcacggcgttcggctaatcttagcttggctttttctagtttaaattgatgttgctcaagataagcggctggagttaggacatcggccagttcttcaggaattagagcttgaacttcgtgcaatcgtgtcctaatcgatctacaatcgaccactaagctatccagagaagaggcctctagccgacgcgagatatcttcaagtgttttctttgcattgttagataagagagctagagctttgcttgaagtatcttcttctgcctcatcaagataatctttgatatcaaaagagaagagatcggctagaacctgcaggtataagttcagacagtttgagagctaagccaatatagccgatctaaattcttgcatcaaaggaaaacttactgggatagcaggagcagctggttgttcttcttccacaatatgatgactccccacggccgatggagttcggtcactcgatgattgttgtacaggggaagaaggaggaggaggaggaggctgtaaaaagacaagtgttagacaatatcggctggaatcaactagtaaaattgagagtatcttactggtggagctggtttgagaattgctgctgccgatttcttctttatagcagttttcttcttatgcaattacaaagcttatgagtagtcggctgaaaaataatgattataaaagggtttgcagggaaagacgttttactctgaaggagtgggggcagaaggagttggaggtatatgcttaggcgaagccgatggtgttttttcagtatcacttacttcggctgcagcctgatcaacatcatcctcaatatcttcttcatccagagcttgttcaatggatggatccaaagcaggcaggtcatcggttggcttggttttcttagacttggcctttttctttggagctagagtcaaggtgctcacagccaatgatctagttcttcttttcttggttacatcggttggttccctgatggcgccttggaggagggttgagacctaagggggcatgatagccgatgacagggggagacaatctgcctccattaggaatcagacctagggcatattcaatgttcctaccactattgctctgatgtggaggggaggattctgttgtctgcaaaacaagaacaaaagattagtcaagtaatgaattggctaaccgttatgaaatttagtgatgacaaagtttacctggggtatgacgtcagggaatagatctgtcatatacattgtggccgattgatgaaatagatgcaacttccattcaccccaccatctgtcaaagttcctactcctaaatcctgctaactcaatattgtcgatactgcctaaggaaggtccttggaggttaagcagtcgatccatcattagagttgaagaaatttctcctcggcattggatcttgtcagcaaagaataagccgattgggagttggtctaatccaagttgtctagctgaacttatagggtgatagaattcgtaggagacttggatatttcttccttggtgaataccgacatgtaggatgcatgggctgattgcagctgtaaagacttccctggacgtttgatatctttcatgattgatgtcttcaaatctgaagtctaatgggagctcaaggtctgctaagtcttcataaagaaaccaaacccgggcatctttctggaagccttcataaaagctgcagaaccaatctttgagcagctcagccaatagttttaccccagcatcggctagtgtggatgcatattctccatatgacatgcatctgcgatgggtgcgttcttctccatcgtcttctacaattggctccaaccttgggaattcagcttctgttacatatggccgattgacaactttcatgactaccaggtttagccaggtctgcagtagccaccatggtccacctgctccaactattgagccgacggctatcttagccgatgcattgttcaacatttggtatagatagccgagaaggattttgcccaaggggaattgtttctttgatcctaaggctccggctacaaattgccaattggttgtgagaccacagctggatccacaaaagagaaacttttctagccacattagcaagaaagctacgtgctctcgaggagtgacaggccttttgcccatgtatgccgctgcataaccagaccaccctcctatgcttttggtcttgaagtcaaattggttcttggtgttcatactcatagggttagccgatgaagttacatctaatccagtaatcatgatgatgtcgatcaaagttggagtcatcggcccttggttaaataagaaggcattgatggtgttggaccaaaaataggtagcggcagccattagaggttcatccttagcagaattggctatggtgagagaaagcgcttggccgatcccaatctcatcccagtggactttcttactagccgatatgcgatggtaccaggtggtccagctcttatcaggggtaggcctttcgagagatggccaagacttgaaggtattcttccagtgacccaggttagggttagctagtctaaaggggattatgttggtttcaccaatgatgaaatcagtggggtcaagattgccgattgggccaagaaaataatggtttttgtgcgataggctgggaatcgcaactaggttggaaaggtgctgcaaatccaaaggaatcgggaagcagaaaacataatgagaaaaggagaaatcgatttcatgcgaggaaaagggatctagccggtgagaacttacctcagcgtactcggctgatggcgcagtagacgggctagtggaagacgacatcaccgcaggcggagatctgatcagaagcgaaatcgcctggggatcgcttttgcgtcggaggaatcgccggagagagaaaggacaaagttttgcttgagcggtgaaaacggaagtcacggcgtgagatttctcgagggcaacggttggtatttaaagcgatagaataacggtcaaaaaacggcagagtgcgaaacttgctcggagtcggtacacggcaaatccggaacattatcaaatatcccggacttggggggcatgtgttaacgaccaaatttggtaatatcagcatcagaaaaggagattagatcgaagtggagtcgaaggcggagattgatccgagaacagagcaagaatcggctgaagtccagatcggctacgattaggatcggctgggtctgagtcggactaggtaagccgatgcagccgattccgacagtataatttggtgtatgacatcgggttgaattgaggtgcttcaagatgatttccgcacatggatagagtcccaagaaggcaattgtatctattaattaggatgttttatgtaacttccttagagatatgtttgggcaaaagtctgccgcaaagacttatggtatcttagtgtttgttaaagatagtggtcatgtccggtatggacatatcttgtaattctcgagtataaatagaccccgagccctatgtaatttttaacacacacattcaatacaatttcggcgcatcgccacctttttgctttagttttgtttcgacgagttcttgctttcgggttgagctgcatcggtttcgatcttcaacaagaggtaaaacttgttatgacgacttgtgttctcgagattagtgcttccatctttatgacactctaatcttgtctatataattcgtcgagttattatatatcttacataatctttggcaatatcgtcatctaacctacaatcggctaacatctgttaatagaaggcagccgattaggttaaatagcgacgttgtcctagattatataagatatctaccactttatgaaacatccagcggctttgttgtctagatattgttcttcttttcatacttaatgctgtattagttgagtttgatctattaagtcgtgcttagaatatcaatctctagcatgtcctctggttaccgattagggtaatatcggagtttcagccgatcttatctgatttaaccatattcaatctatatgcttcagtgacatgttaaatatgccctttatatcaagatcttattgcatttaagtatattaagcttttgtttggtatattatacttgttttgatatctttatatagagtagtatcggagtattaaccgatacatgctagatctatctgatcggctatgctataaacatatataatcctattattaatatatatttcgatttaagtgatttatactgtctcggcatggtgaccgatctatcccaatcatttgattgaagtatatattaatataagaactatatatcgttaatatctacagcctatcgaatagatttagttccttactatctatttataaccactgatcgattcataaatgacatcggctcaaagataaatgatatgtcatcggcacttagccgatcggctatcatttatagatttaaccacaaattctttgtctctatttcttgttgattacaggattaaatcaactggcacgctcatacattcgaagacgagctttggacctgcactggagttaagcagatctcccaggcctcgtgttttctgtcaacagatttaaaccacccaaaccacttttttaagcacatcaataaccaatattggttccaatacactgataaactccctccccaagctatatctttgtcggaggcgtagttagatatgggtatataagagaattggggtggtccagagtgagagagagagagtaaatttaagtatttaactaatgcaaagcgaaaggattagtcaaaagatagtataaattgaaacattggcaatagaaagtagtctaagctacaattcactcaattaatatacatattaatttgtcgaaacacaacgaaattgtatagcagatgcaattctacttgtaaatgaaccttaacctgcgatttgcgtagaattacgtgaaaattttgggtagttttattagtacaactttacaagcatacaacacatcttgtgaccacaaagttggctgacataaccaataatcatgacatacatgtagataagcaatccagcagtccaagatgtcggtctactcatcgtgatatgatatctatcctttcgagaaagacaaccattaggcgcgtgcatctgttaaaatttaaaaagaaaactcgtaggtaggagtagttgcgtattttatccaaattactagtagaagagtagtagtacgagatatctgtgtgcatggtgctctcactcgtgcaaagaaacaaattagtaaaacattgtggccctagctgcctggaataatcctggatcgctaatccatcacaccccctgacaaagcacctgtcatttggtttggagctagaatgatgtgagatttcccctgtgacaacttccctgtctaccagtaagactaacctcagaataactattgaggacgacaacagagatatttcaacagagataaagattgacgagaagaactgaatcaatagcactgcatgcaaccacacagattattgtggcgtatgtatgtgtatcatcctcgatcaaattaaaggaacgcccatatctgcagtcatgtcgatcgatcgcacaccatagatgagattgggttaatcacgcatcccccaccatcactggaaaagataaccgaaacagctagaagcagaagcacaaagaacaaaatccaatagtgattagtactcaacaacagcagcagcagcagcaacaacaatctgacgaaccattccgtcatgatctgcatgccaatccccaccatctctcgtggggcagcacacactgcacgaacacacgctattccctcccccacttggccggatcagttccaccacaagctattgccaccccactcgatcccccggtgggcgccaccgcccgggtcatcggcgattcgtgtaggcgccaaacaggctcacatgttatattttggatttttttttagacttgtgtacttttttccttctaaattctatgcaaatagttatgaaaaagatttaaagaaaataacaatatagactacagtgaaatctagcgcttaaccgaaaatcaacatcaaattcgacctacgtattaaagaagaaaaagagacaaatttggatataaatatatagtgccactactatttaccaactgaaactttttatatcttagtaatatatatgatgagttttaacgacctaagattttgtggagcgatatatatatacgctgcataaatatcatctatttttttcagaattttttgtaactgattgaattgtttttagatggaggaggagacaactgagggagggttcaaaacagtttcccgtttttgagcataacaatctctctctcgttcactgcagcggttcacctgaaccctgatattccccgaggcccgcgtgtcagcgacacgggagccggaaggaacgcgagcacgccatgacagtggcggccggcttccgtagcaaaggacgtacgtacgccactgccactagctaagctaaagccaaactcctcgcccgcacgggccgcgtcctataaaagacacaccacgcgtggcagagcacaccacgccccaattcgagatcgatcagctccagctcgtggagtgtgcgtagcttgattgcacttgcgcagcgaggttaatcagctgcaacggcggcgaggtcgtcgtcgcggaggagaggacggcgtctgtttcggtggttggtgcttccgccatgctgcagggggaggagaagaaggccgggaaggtgaagaaagggtggctggcggtgagggtcggggtggagggcgccgacggcggcgacggcggcgggttccggcggttcgtcatcccgatcgcctacctctaccaccccttgttccgccgcctgcttgaggcggcgcgcgacgcctacggctacgactcggccggcccgctccggctcccctgctccgtcgacgagttcctccgcctccgctcgctcgtggagcgggagacccacgcggccggcggcggcggcggcggctcgtcgtcgccgcaccgcgtccacgccggcggcggatcgcaccaccaccaccactactccttctccccgtgcacccgcgccaaagtcagctcctgatcgatcgagctcgcttccgtgcgccatggcggagtcgatctgccggcgaggacgccccgcgtacgtgtacagtagcgattagctatagctagcagagacagtacacgacgagaggagagtggagtggcatacagtagctaggtgattagtgatttgctccgggttttcgatctcatgattttggtctcttgatttccccttcttcttcttgatctttttgatcgatcttgtatagacgcatgtatgatagaattgacaggtcgacttatgtatgtataattatcagttgaactcacagttcatagctattatattctcttcacacattttatagctcgatttgcttctctgtccattgctaagccagacgaattaattagccgctgattgatcaagacggattaggcatgagctcgaggtcgaggcgattgcttctgccgcctgccggcgaggcccacctctcaccaacgccggcacggcgaggagtcgcggcagcggcggcggtagctcaccgtgaaagccgccgttgactgcgggtcagcgagtgagcccacctgtcagagagaggagttgagggggtggaggtatatttacacaggaaaccctcgttttcgtcgaattatctttcacaacccctgagaattgggtcgcgattaatggtagcgatctgactagaatacctcttcgccgttcgatcaaactctgcagttcagattggttggactcgagtgcaggtaggacgttttcgttgagaatactcccgagagtttggatcgcgaccatcttggatcactcttcatcgtccgattatcatctgacggtcgatatcaatcccattggagagagtaggacttgtttttcataaaaccctcctctttgttcgtattagagcagatacaatagcgggctataagctagttataaatatattttaaaaagataaagtaagagagagaagagcaaaagataaagtaagagagagaagagcagcaaactacagatatgtagccagctgcagaatggactccaagacgtaatttgtctatgacaagtgagaccagatattaatagtatagtaagcaactattgtatgaattagctattacattggctatagatgatttggagctagtagtgggctatactattaaacttgctcttatcagttaggccggcgactctcttccttctggtgccgaatgcccgaactcgccggagctccggcgatctcctggaacccaatcgatcggttagtttctatatgttctttgttgcaaaatagtttgattagtatgtataagatctactttgactgttgtttccaggctcttgaatcttgattgactaataagtgtcttgagaaaagttatcttttgactgtcgatgggtttcaattaagggcatgtatgatctcaaatgagggttaatttttgttggttttctcggtgcggcgtttcttttcctctggacgactcatccatgtcgtgtccatcaggaatcactgaatcaggataggttcagcattgaggcaatttgcgaagaggtgacagcactcgtctcaggacctgatcttcagtgcatcttgtctctcgatctctttctcttccttttcttttccttcttttctttgcactatacatcaaatcaaattgacaaccaaaatctccactacttcatttttaacgtgaatttataggtggtacttgaggctaagcctaggcaagagacgcagttgtgtacctccccatattatggcaaaaacagttttaacccgaaaaggctttcagcagttcatcgttttccttcttcttcttaggctctgggcacattgccaaacctacaccctgcccacccaacagccacggaagaatggtgttcttgagttaacaaagtcaacaaaaagtggtggtctttatgacaggcttacttgtgagtcttttacccctatgccattaaaaaagttggaggttacgtgtgtgctacaaaaaaaattttgagtcacctgtatgacatgacacaaactttcgtttacctgtgcgccactttggatggaattagcactaacaaagactaacagaggtttgaaagatctattttgcccttctatttcatccacttttgcggcggcggtggtggcgctgcggcgtgccggcgaggcaaggcggcgacagcggcgtgccggcgacggcgacgaccggcggcggcggcggcggcgtgccagcgacggaaaacgaggcgaggcagcagcgtgccggcgacagcgacaaacggcggcagcggcggctagggttcaaggcgcactggaggagaggagtagtggagatgaaaatgctttaggggcaatttagttattttcatacgtgggtcccacatgtcagagctcattctctaacagaaggtggatggaatggcacacaggtaaacgaaaatttgtgtcatggtatacatgtaactcaaaacttttttgtggcacacgcgtaacctccaactttcttaataatggcataaaggtaaaagactcattacttataccatgagtgtacatccaaattataaatttatacactaaaagtggtggtctttatgacaggcttacttgtacattagtgtacatccaaattataaatttatacactagaattagtcaaaatttgacatttcttttagctgaaaattaacaccgtaagattacattcattttagactgccattatttctgtgaccggagggaatacagtaaagttgtccttgcaactcagtggatataagtcatgactcgtattcttgccaccaagacttctaatgtatttaagatgtaaagctataagtcaatttggactttgtatagtaggattaatgatctggtggaacaatgggaaataccataatagtaatgtacagtgactacttatctttgagcaatacacagatatcatatcaccatgcaagttgattttaatcaattaaagttttcaggtagaaagtacaaattgaagtgaacactagatgcctaatgatatattaaccttacaaaagcttgtacatccattaccatagcccaagaaagaaactcatctggaaagctgaaacaagctagacaaatagttgcaatttgataagtacatggttcttgccccttgccgtatcaacttctcttctctccattagcacatttccagcatattccccatgtataactgcgtagacacaagaattattatatcatataaaacgtactttcatttttcaactattttatctcgatcaataatgatatagcttcgtggctcagttcaataataataataataataataaatgcctgcaatcttcaccgatcgcaaaactgaacactgatttttttcaaaaagaacaaaactgatcactgtgaacgaacagaagcactagatgtaactgtatatattgacaatactgtcaacttgtactagttgccgtactaatccagctgcaaggctagcagaggcgcgtgatctcactccatttgtgcagttgatctgctttgttcagagtaaacaaatatcagatcagatatactactgccgtaaaaatcacccaaagtgcagttcagctcattcgatgcatgcatgagtggtctcaagtttaatcttttttaacttcaactatcatctcctacagaagtcagaaccaatcctcagctcgctcatttgttctttccacttccttttgcgctttaacctgagcttgtcttagcctttaattaaccaagagataatggcagcaactaatctggctgccactagattgttctgatccatgttccagataacgatattcacgaagaattgcagggcaaagtaatggacagagatgacaacataagcagcttgtttatttggatgtgctgcccaagtggagatcggaatttcagagctcgtgccagcgtaacgagttgccattggatggctcgtcttattctcgcaataaaagtgcttctgttagtactagttattagtgcaaagaacacttttccaaatgagattttcgcaaatattttagtaccattaacagaaaagaacagattggatcgctctgaagttttccctgcctgtcaatggaagtagtagtaaaagctagtttacaacggcgacgaaaaatgaccgtgaatgtgatcctctagtaactctgaagtttctgagatctgcgtcatgagcagtgtttcatatgatgcctagcatctctgaaaacaagtccacaaatcttctcgcggaatccttcagtttgagacaaatgtatagtatgctttgtcaattgatcagttgagcacgtaattgctacctctcgatcgctctctctttcaacgaaaagggagagcacgaattgctacttctgcagcaacaggccatcagctagacagatactcctcgtaaattgtccaagaggccagccaatcggcctcgacacgtctatctgcatttctgtcgcttcttcgtcgtgtcaaaccggctattgttcattggtttggaaattttggattagacgtcgccggcggccatggtacgtccgtacgtacgtgtttggaggtgatgtgtgcagttggtgaacacagattattctttgggattatctttgagagtttgaggcccgtggcagctcgcttcaggaccggtggccgtcttctagggcctgattacttgaacatcttcgtgtcggcttcgactctctggtccttctggtctcttagtagctgtgaaaggagcggaattttagggttttcaactcggtgctctcctcggtctccgtggttttcgagtccatcctctcagaggattgtctgtggtcttccactggcgttgctgcttttgtgttttttttagtgtagtgtggctccacctctaccctctcgctgattggagtagcttttatttttcgagaatgcgcaaaagagttgcgcatcttttgtattaagattggggagaaattgtgacagctttacagtgcaactgaaagagaaaccgaaaaagaaaggcaagaaaaggaggctaagctataatctcatgacatcaactttgcaaccacgacagccatgatctactcggggagtagacctgctagcctccatagggcggcctcctctgctgctgccctagcaacctcctctcacgctcactgcttctggttaaaaaccctattgttcctctctttccatatgaaccaagcggctaggaccacaactgtatcgaaaccacgacggagctgcttcgtcactcccttcctggctgccgaccaccaagagatggagttctgagaggcagggaagagatccggacgcccaatggcattcatcacaatccaccagaattgtgcggattccgggcagtggattgcgttgtgttacaattttttttttcctttcaatatattaacgtgcaattttttttgcgtgttcacgtgaaaaagagtttagctttgtgaacttcttttgaatctggcctgattggactggttgaaaaatactcgatccttcgtcggtagagaaaaccttagacaagactctgtgttatactatggtcctgtcagtaccattcatgtactggaaaaagaaactccgaagatctggagaaactcgaaaaaaaaactctgaagatcagacttttgtgtgtttatgaggtgtgtacagcggggttattgaattgctatggtaccaaagtgaaatgagtgaaatgaccggtgacttatatttggtagtatttgaatatgacgataagtacaatagctgaaatagagagatgctacggtagctaaatgaactgtgacacattaaagaaaatgttattttgtaaatatgaaattatgctgatctgaaaataaatggtaggacgatggaacttgcctgctctacgcttcatctaagttaccaggcacaatttatgcatgtttgtggtgttattgatcaatttttgtgctgtaaatcacatgatcaacataaaaaaaaacagctattctcatgtgagataaatccaagtaactagtgaacaaaaactaatcctgaactccgtaccatcatagatttggttggttggtcaggaatctacaaaaggaaaatgtgaaaggcactgctctccttcttgattaaagaagataagctgctagtttgctacattaccgaaagtggataatcaccacgtgaggttggcatcttaagccgataaaagcacttgctaaagcgtgcgtatcactcttaacttgacagtatttacacggagcaaatggcgagagctaccagcttatagcatcagcaatagcagcagcagaactatattcttcagaaagcctggcgccgttggatattcctgcatttcttggatttttattccgatttgcagcgccaattgatccttccacgggccatgactcatggagctattcactgtcctttcggcacaggagcagacacttgttgcaacctgcagagatgcttctgaaaggcgaaatgttatctggagctgagcatctgaattcatttcagagagaagagcaatggcatttcacttctgcctgatacagtggcatggtcctgctggtcctatgcgttggttggttgggatatgaggtgtgcatcgtgttagtggactggcttccctactttggtcagggaattcagcattggaaatgtgcagaactgcatatcaaacagtgtggtgcgttaggcaagaagctactcctacatgatgaaaatgagtttcaactgaaagactgaaagcgaaagtaccattgcgcggacggaaaggtaccaaagatgaggccaaagtccaaagagaattagaagaaaaggagagagcgtgaaagctaacttcacatggctcaaaactgctttgtagaccacagatcagcaacgagatctgattccaagcagttaaaaaaatttacccgtaacactctagcgagatctttttcgacgccggcagatgaggggtcgaagaaaaagagcttgtccgtggctccccagtaaagaaaagccaaccaatggtcatgtatgataacatggacagaattgacagtcgtcagagaagagagtacttgaaacctctcctttcatgcaaagattgcaaagctatatagggtgtgtttagttcacgccaaaatttaaagtttgattgaaattggaacgatgtgacggaaaagttggaagtttgtgtgtgtaggaaagttttgatgtaatggaaaagttggaagtttgaagaaaaagtttggaactaaactcggccatattcagagatgcgaccgagtacgacgacagctggaagatgtcatgaaagaaagccacaattcatggcatgaattgatacccatagaaagaagctccaaaaacatcgccgatatgatactgtccacctccccttgcctaaatgaggcttcaagtttacaattactacagaattggtccttgactacacattgcaattcacatctgcgagtagagaagtagtagacacaagatgaaacttgacaggatctgatgcggcttgttcatccaaggagcctctgaaacgcttccggcagggccatttgcagtggatactttgggcagtgtgaaagaccctccttgcactgatggtgagcctgagttcggagggggaatggcgccgccggcttctgcaggtccaggtgccgataatggcgggagaaacgttgaatcatggttcaccgtggtagggggttcagtgagttcagggaactgatgtggtcctgcgtgcagaagaagaataaaaaacagtggacatgtatcaaagtaaaagtggcaatgctgactaaaagagccgagttaaagaacttgtaatcatagaacgaacaattgctgctcagccaaagcgaaggtatgaatgtattcattcgcaaagtatgatgcaggttgctctggaattcaaagtgacaaagtgcaatttttgcaactattcaggtgggatgttaattctgttgatgcaacttactactgttttttttaataaaaaaggatgcatgcttttccagttcaaaaacctgaaaaatactaacatctgaggcagattgaaattcaaatgcacgatattgctgcattgtaagccagttgcaggccacaagctcacagcaacagtaattacctggacatctggattgaagacctgtgctcagcctgcaaaggaaggtagaatgtaacaacttgatagtagaagtagaaaaaacagagactctgagcaacatgttacttacaatgtggtaatggttccattaacaaaacctccgtagctacaagaagaaacattgcagcctgcactggtggaacgagcgcttacattacctagcagaacattgctgttactgcactgcatgcttggacatgaccctgtcaatgaagctggtgtgcaatataaactgagacagaagagaagacagacattacgacccaaataatggttccatataatatcgtgttaaacagaaaaggtacaatctgaaaattacttgagattccctggcccgcaactacactgcacacagtttccagcagtaagtgcataagtcccatttgccacaattagtccatggtctgaagcagatttgggaaatgcagatgtacatgctaagatacagaaacaagcaacaattgtcactggaagaactagggagaaaatgctgatatttagaaaagataaatgatgcagcccaactgttgtcacagaaggcagaacagaagaattagcaatcaacaaaagatagagtccataaacgcagaggctcatcataatatgatgcttatgttttcttacaggatacacaatctgaaactcactgaatgaatagaaaggaaaactgaacagttcgtgcataactctccaatagtatcttcctaattcctattgaagagtaatcgattgcctaaacaaagttctatttatctgactccgatgttagcgaattgaaacatcgcatatactccttccgtttcataatataagactttctagcattggccacattcatatagatgttaatgaatctagacacacatatatgtttaaattgataaacatctatatgaatgtgtgtaatgctaaaaagacttatattatgaaacggaggaagtaccaaacatcaaactgcagctagtaattgggctactgtaatgacgacagattcataatttcaaatgttcagttcggaccaacatgaggaagactaaaatcgagcaagatggtgaagcccgacattaaactgatgtgattttctttactgtactaatcaattaaaccctagaatataagcagcctatgaagcaatcaaatattaaagctaaggcaccaatgcaatgtccactagcatgcatactgtttatatccccaatgatgcattgtctgattattatttattcagaacaaaaacatactgacgaaccaatttgcctgcagaaaatatgctcgtttgcaaagttttagctcaaaacagttagctcaatgcaataaaccatacggctcatctgcgatatcgtttgcaaagtttgagatgaacatgtacctggcaatgggatggcgagaatgtcgcccggcgcggcgatcgggcttcccatggcgttcacattcatgacatccgtgacggtggtctcgtagctggcggcgatggcgggcacggtgtccccgacctgcacgacgtaggagaggtacacggcgggcaggttgttgtcggaggagttgaagcagacgcagggcagcgggacgacgagcttctggccggggtcaagcggcgcgtcggggtccgcggatgcgacggcgttggcgttgcggatctggtcggcgaaggcgagccccgcgaagacgccgtcggcgacggtggcgagcgtgtcggcggggcgcgcggcgtagcgcacggagaccgacttgcggacgccgtcggtgcaggagcagcgggtggggacgcggacgaagaggcccatcgggaggatgcggtgcgccgcccccggcgccccaaagtccagcgcgttggcggccagcagcgccgccgggtccgtgccgaacagcgcggccacctccgacaccttcatgtcggcgtagagcgtgtagcccagcagcgccgagcacgagtccgaccccgtgcacggctcgatcgtcgtcttcgcctccacgccgcccggcaacgacgacaccatcacaaccacgaccatcgccgccgccgccgcgacggagccacacacccccgccattccactccactccactccacactccaccaacttcaactgtgcagtgcgtgactctgcggaagcgctggtatacaagctgagaggaggagggtgggggggatggcccaccggtcagcggcggaaagggaggagcgagtcggttgctgggtgagtaatggcgggaggacgctggaggcgtccgcttttggcagcgatgggggaatctgtgccaagcgaggggaggagggaaaggtatcatcagagcaggtacaatagcataatataagtcagctgcaaatatattttaaaaagataaataaggagagaaaagagcagcggtctacagatttatagctagctgtagcacggactccaagacgcagtatgtgtatgacaggtgggaccatatattaatagtgtagtatataactattgtatggatgagttattagattggctatagatgaattggagctagtagtgagttaaactattaaacttgctctcagagacaccatatctttgcctctgccacgcgttggtttcgaggctgagtcactgcctggtgggtccgaggataccatggagcccacatgtcatggagtggttttggttaaccgcgaggttgacggggtgcggtgcgtctttgcctttcgaaaagagggcgaaccggcgcaacggtcgacgtgagctgaactgggccgcgtggcagagaacggacgggacggcctcgcctgccgtgcgggctgtgacccggtcacgatctcttggcgcttgcggccttgcgggctgtcgctgacttggtggcagagtcgcgaactgtgtttcggattgggctgcaatgagtcaggcagcggtgtggcccaagggacggtgtggcatagcccatgaacagacgacctcacaagttgggccaggtagaactctccaccggcctgttacgtgtgcggcagcgaagtaggatggcccttttatatgttgagggacaggaaaaagtacaaccgaaggtccgtcaacttgtcatcgaattacaaaattgtcattcaaccataaaatatataacatctctcaatttaaaaaaccgttcactttagatccttcggtagttttgacatcaattttatctgacatggctactaagtcaatatctttcccctcttctacactgtgaaactgtgtaatattggttgctaaagagagaagaagaagaagaagcagacatgcagaattctactagtaccattgaaaaatgtacgtacgtcgacgtcgtcgctgtactgaccgatctacgagtacgagcagctagcagagggtgtttgactcgtagcctttccggcagtgcatgcatgttaccggccgggggcaggcgtggctctggtgcatggatgggagcacgaaccatatgatactcgtagctagtactcctccgatccaagttccggcgcctgtggcgcgcgacaagaccagacgaaggcaggagggatgcgatgatcgacgcgaccacatattataacgttctctccgtattcgcaaacagttgaccggtgttataatattccacgggaggattcatacgtttgccgtttgcgtaaactcaagagatgccagattgcctgtccacgatattggattggatgtttctcagtactgcactctgcctctctctctctctctctggcttccatctcgacgaataacttaaagatatcaatagtactccagtactatctttgattattaccgtcgatgtaaaattagtccgggtcagatagctgcagcatgcatgcatgtaatggccggccaattagcacactgttactccggcctgaaagagggttcagagacagtttgggtggacaaacgagtaaggctgtgtttagttcaacgcaaagtttagattttggttgaaattagagatgatgtgactgaaaagttgtatgtgtatatatgacatgttaatgtgatggaaaaggaatgaagtttggactttggatctaaacacagcctaagctggctagcaagcatgtatgcatgggatggggcacacatgggtgcgaggcgagcgtcccatcggagaggcagcatcctgatcaaatcacgccgactggtctgcgtgccttacgggacgggccactgtgcctgatgctacgttgtttttggatcgcctgctcgtgaatactcctttcttaagcagtagtccacttttctcgtcaatggctgtgtttagttccttctaaaattaaaagtttgggttgaaattggtacgatgtgactgaaaagttgtatgtgtatgacaggttgatgtgatggaaaaattaaagttggaagtttggattgaaagtttggatctaaacacagccaatatattgtttgtgatagtgtgatccccactgcttaattccaagtcattccttatttgctggttgatgatggtgaaccatatatatgcatgcatcgagaaatatattcacctttcaagggccatgtacatgcttggatgttgattcgatggcttaaattaaattcatcagattaatttgaattgtaaaatttgtcaaagcagctattttgtggttcaccggatgtggttcaattggattttgcgctagctattaaattgcagaccccagttgggagcactacaagtaatcaaacctacgtatacaaagtggtcaacctcaaaatggcagtcatatatagtactagcctactaggcctgagtatattgcagaatactcgagaaatattgcaactacaattagtcaaatactagcagtatactcatagctgcatagctgctttgagggggtgtttgggagagaggggctaaactagtccctcagtttagcccctctcttccgaacacccctgagtcattacattcagagtctcagagacttgataatgcagtagtgtcctggtatgcgggaaggagacatgcagtgtagtactgaaatcagtgatacacaagctcacccacgtacgtccgcacgcacggccccaggaaaaacggggcacaagctagcagctgcataacgtggccagtatacaacgtccagtacagcagtagcatggactagtacagtagtagtactgtactgcaacaatctgactatttttttttggaactgaaatcatctgactgcgtcctccttttcatttcctttttctttaagccagaaagatctctgactgcctcttcgacaagaatgcaatgacgctattttctttgtgtgtttatttagctggtcaagtcgccgtcacacaaatgtaaaatactccctccgtccaaaaaaaaaaacaaaccctgattttcgtgtgtaatgtttgaccgtccgtcttatttaaaaaattataaaaaaattaaaaagataagtcacgtataaagtattaatcatgttttatcatctaacaataataaaaataccaaatataaaaaaatttcatataagacgaacggtcaaacgttgacacggaaatccagggtttgcttttttttttggacgaagggagtatacagtaacgtacgtacaagcgtcacacaaaggtaaaacatactgtaacgtacaagcaatatatgccccctacaagtgtccaaactgcagagaatctgcaaaactaattaattggtgcccagttcgccaatgtgccactgatcatgatttatatattgatgtaggagtactaaatgtgcatgctgtatcgggaaggaatcctatcgaaaaagataaaacaaaacatgccaagacactcgttatttggagtgtataattagggacaagctgggtgcatgaacgatttgtctcatccatgcatacgcgatcatatcagtatcatagtatcatgtggaacagggtcatgcatggcagagtgtgagcatgcacgtacgtacctctcactgcaacagtattcagcagagatcactgcgacaggggcccatgatgtgctccatcacagacacaggtggcccacacatagtactcggcgttgtgtgcccatactgccattgccattaacgccagctacgtacgcaagagataccatgctccccaaagccccccccccccccccctctattgttttcttgttgccctcctcctcctgagcttgtaaaccctagctaacacagctaatgctatagcagtgtgacaatttatgaggttttttacacacacatagctgctatattctcagtgatgcaaattttcccaaaccatacctatatacttcatccgttttatattataaatagtttgatttttttttcttagtcaaagtgctttaggtttgaccaagtttataggaaaaaaaagtagtaacatttacaatactaaattggtgccaaatctgtagttttgcaacattgtgttttgattctgaagtatataggccgagtttagttccaaactttttcttcaaacttccaactttttcatcacatcaaaactttactacacatacaaacttccaacttttccgttacatcattccaatttcaaccaaactttcaattttggcgtgaactaaacacacccataattttgtgatactctattttagatattaactggcgagagtttggttaaagtatttatactcatgtggaatttactatattcacaatgactacaactacacacactggtatatctctttctattcaccatgacacccatgagctagctagctactctgaggggttgtttagatggggctaaaactttttaatcattttcacatcggatgtttggacgctaatttggagtattaaacatagactaataaaaaactaatttcataaatgagagttaatccgcgagacgaattttttaagcctaaataatccataattattaaaagtttactgtagcatcacattgtcaaatcatggcgtaattaggctcaaaagattcatctcgcgaattagtctaaggttatgaaatgtgtgtaattagtctagtaataagtcccagttgagctctatggctggttagcgtatttaaggagggcagaggtgccatgtcgtcagggctactcccctcttttctctcctgtcacactcaagaagacttgtacgtcctggattatcagtggcctactgttgttggaaaagacatggggaaagaaatttgtcaccgcatgcagctgtgtgcgcttggatgcttgcatatgccacttgcccacaattatgcgcgcatcattccgcctagaagctcgaatgattgcatgataatgcgtattgtagaaaaacacttctcctctagctaggtactccttcccctcatatctagtaatctctcttcgttgccgatcaagaaaccatgcagggagatcaaagaatgacgaaacatacatttttgcaggtaagtagtaaaacccttactagttagttaacgctgcaagaacaaatgtatgcgtaattaatggatcagtagtgttagcatgttgatcaatcatcttcagactcccaagcaagttcgtgctgaattactacctgctgtctgaaactacgtactagctagctgacttgcaatctagacgaagacagatcgaagagctaactgcagagcaattgggcgtcgatctaaaactacctaataacctagcatgcggtagatcaattgtcaaacagtcaaagggatgaagccaagagaggcagagagcatatgttaagcttaccgtctgtcggcagtggattgttggacagtgtgaggtcgacgacgacgcgcggtgatcgatcgcaaagaagactagatcatcgaattgacaggacaatatgccgcatggttaaagggattgaagcctggtccgaggctccgagctcgccggaaattaggcgcctccagtaggaaaggagaaaccggagtcccggatgcctcgagccagacaacaaaccccttaacctaatccaagcaaatacacacacactacagatcgagacgccatggatgcatcggcttgcgaggaatgaagcctggtccgacgcttccacacgcccgagccggctcgatcgccggagaggaattaagatgtggatacctcgagccagccaacattccccacaagccaccatggccaatgaatttaatgaagaagagcacggacatggcgagccatgaaagagcagcagctagcagtgataccacatgctagcagcgcgttgcaatggatggatcgttgggcaagaaaggagaaggatgcgagggttttgaagaggagagggatcgatggggcagggaagcgaggacaggggcagtaatggcaatttatggtgacatgccccatttggcacagcgggtgccctaatgcccaataactgcgctactctacgtccagcccccggcctgtctttacgttgctcgagccagtgaagggctttgcagttctgctgctgcttgctagctgcgcgcatctctcactttcctcgctcagagagaggccacagctgactcactccactgctttgaattcccacaaaatgcctcgtgaagtgcaccccttctctccctagctctctctcgtctcttcagggcctggaatgtcttggacaagcttgtggtgaaaatttacttttcatctgaaattcagaattgaggaagtactcttctaaaaaaagttcagaagagatgaacggcaaaattcatattttcagaactgaggaaaagactactcttctaacaatgggctcacacgagatgaatgtcaaaattcggaaatgaaaagaaaaaaatggtatacttatatgcagtgatcaatacactttcaggacatgatcggtcggtgcttttaattctgatccgacctgagcatattcattctctttaagacagcattgaagtgcccttatatatatcaagagatgaggtatagctttacgatcttgtgtgtaatactacatatacagtactcctactgttcactgtttgtaagacagcattgaagtgcgatagcttaaaaaaagtgcattcatttacatttttttccccttaagacaagcagtgtatggagtccattttgcctcgtgaaatgaaccaatttagtgtaaattaaagtcagtggaatgtctgtgaaaggcttgtaggaagaaagccttcattaaaaccacaccaaatataacctcatctagtcacctgcgatctactagcccctcttccatgttttactgttctgcagttacctgccccaaaactaaaggtcttctacacacatacctctactagcagtagatagtagctcaaacttctaaacgttttccatcttggaaaggatggagaataggaatgagacttggatgacttgacgcaagcaagtgctacaagaatcaaaatgtcctttatgacaagctagctagctcgccagccaaaaagggcttgtaattgcatcaccgaaatgtcaacaccactccccgaaagagtattcaaaggctttctagctctgggttcttgggttcttcctgttcttgggttcttcctgtatatacacatgtatatgtctcagcttattcaaaaacatgtccatcaacacacggatacacagtgcacgcacgcatgcagtccacgcattttggaaaattcaaatttcaaaaatgaatgtgtactatatacatatacacataaactaatttgccaaatggtctgaagatcgacctggcctacattgtatattttgtatatacgtctagggctgtcaaaaaagtttgagactcacgagttgctcaagttctattcatcttaggctcgattcaagctcggctcgagctccagtcgagccgatcccaagcctctcttcaagctcacgagctttatcgagacgagctcaatcttccaacgagcatagcaatatattatttttattgtttatttaataaattatgtatcaaatatactatttgtaagtatcctataaaatgaagtattttgtattggcatcatatgtttattttattcattttctcttttattaatgtgatgaactaaaaataattaattttttaaacagattattcttgaaatatacatagttctacttacaaaccgaactcgatagtcaagctcgccccaagcctatctaaaagctggaaggtttcgtaggctcggctcgagcttaagcataggcaagcgagctcggcgccacgcctcggctcgttgacagccaatacacctaatactagcttgaaactgatcaagatgcctgtgtatatgaatgcatgtgcagttttgtaccacagtagcagttactctcagtcaaccttgcagtgttgaccaatgaccaccagcctattacacacaagtacacagtgcctttggcctcccacgtagcccgacagagcttgtgatgatcaccatcattacctgttgatttgctcagctcccactccctggcacgtgcctcgtgcgagagagccacagctacagctagggcctccacggcctgcagctagctagctagccactggctcgagcattctctgctttcctttaatatgagtgagaaacacgcgtgaatgacgctccggccccgtgccatcagcagtactcgcgcgctagcttgagactatatgcatgctacatgcaatgcttgcacgcttccgatctgcctaccttttgatctttttttgttctgaacgcttgcacatggtcaaagtgtacatgtacgctcagctggtacgacgtagctcccctattgatatcgttgctcatcacaagcaatgaaccaatcgtggctctccatgtatgtaaaaaaaaacaacgagaaaaaaacactatggcatttggcaggtgaacacgcgcgaggacaggcagagttacgttgcagatgcagacatatggaccggtgcggcggtgcgtcgttgccggctggtacgtacgtttgccttgcccgcgggaatgggcaaccgggcgcagcgcagcgctgcctccgcggattcgcaggggcgcgcggttccgtggcgcgcgcgcgcgcgtccgcgtccgcgtccgggaacgcgagagtgtgcctgcctcgcctgcgcggcgcgcggcgacacagcgggcagcgactggcattgtcggcgtggccggaggggtcggggcgcgcgcgcgcagcagcagcagcagcagcgccggggtgggccgggtcccgaggcacggcaccggccggacacgcccgttcggccgtggcatcacgcgttgcaggggcggtccagtggagagcagcagataccgtactgtgcgagataatagctgtatgtaaggtatgcctgcctgactgactgactgccttcaatccttgtaggtggtgtgacattatgtaatggactattccatttcttctcctggctagctagcttctcctcaaggaagaaaacatgcgtatgtccatcagtccatatgtctacacatgccatggaaccaacgctttctgatattagttgattagtattacaaaaacaatatccatttgaatatgttgttttcagaatttaccggtgttctttcctgcatgatgagcgcctcaaaatgtacgtagtgtagtaatattccccgtatttcgtggccaaaaagagagtgaacaaaaaatctggtgaatctggtgtgtttagttcgtgggtgtcacatcggatgtttgactgatgatggaaggggttttcgaacacaaataaaaaataactcgcctggaaactgcgagatgaatttattaagcctaattaatctatcattagtacatatgagttactgtaacactttatggctaatcatagactaattaagctccaaagatttgtctcgtgatttccatgcaaactgtgcaattagttctttttatctatatttaatgctccatgcaagtgtccaaaaatttgatgtgatgtttttggaagagattagctatataactgtcgataactttttagatgaaaaactttcaaatgtaactccactataattacaacgtagttacattgtaactagactatagttacaatgtaactggcacaaaaacgctcagaatcacgttgttgcttagttggttaacatatgcaccgtgagatcgtgggttcgatccatgccccaagtgtggatgtgatttttttaatctgcttgtgcgcatcttgatgtcgaataaggcctaactcgcaaaagaagtggacatcaatatgttagagaaaaaaaatgatgaatcaccgtccttggacggaaaatttagtccgttggacttggaggcgtccctcgcttacggagtcaacaaaaagttgatctcgagatccgcgtgcaacgtcgggtttgaacggccacgattaagtgacgatcacacgcgaccgaccggccctggcccacgcccacgcccacgcatggcgaattggcgatgcttgatgcttgcaagttggtgaaggattctcccggtcgtacgggctcttttcgcggtgaacgcgcgcgagaaaaagaaaagcaacggtttaactcttgtgcatggcttgtggaccatagaccacagtacacgtggccaacggctgttctactgctccagcatgtactagtgggtactactcctgccagtttcacatgcatgtgagcccctggtttcacccagaattttatcgagcagacggtgcacacttgttgggtgaactgatgatgaccagttgagtgtccattgtccatcaacttggacataaacatacacatgctgcataagagacaaaaaaaaggtgatcagtaaccagcttaccgagaagcgagtggttgcagcttgcaggttctgactctatcaacttgctaaaatgggggatcgattgaacgattccccttgtcatttcctgttccacgcacgcgcgcgctcgatcgttcgggccagctgctgcttgtatggttcaagccacatagccatgcaaagccaaagcaaacctctctgaactctgggtagatgtctccattatttttgctagctaggttaacagtggcgcataatgcagcaacgggacaaggaggtagccggaggagcccaagagagagacagagagggagagagttgagacagggtcatgtgcggcggtcagaagagccttggccgccgggtagactggcgctgtggcagcagcagcagctgcgcggcgcggccggtcaattatggacaaatgatggcgccggtgattaggtgaggggacgacgcgggccacaacgccagtacgtacgtcttcggcttcgatcagtcgcttcccgccgcgcgacgacgccacacggcgccagttaccagttggccgtttgggctttaggaaattaataattttatgattaagtttatttcgggcggtgtactgcttcctcttctcgcggccatcggctgctgaagtgctgatcatgtataagccccggcccgttgagaagttatgatgtacattgaatattctgggacggaaggaaaccgtggtactaaactcctcatcagtgacggaaattaaaccagcactactaaactttcggcactaccatccttaagcgtgtatataggaagacgcaaaacccctacttacttttcttcaagtccaatatacacattttgaaataattgatagaagttatcacggagcgaagatatgatatgaactcatggcgagtttacacggtgagtgcgcaaacttgtgacatgttcgcaatgttagcgcggagagaagtgaactatcgaagttagtggctcgtatatacgagaacttgaaattatcataaattttgacaatttgatcttttccgaaaactaattttacaaatgaaccgcggccaaaacttattttagaaataatcttttttatcagcaccaaatcgtatggcgctgaatttagacacctcagcaccacgtcaaatagtgctgaatatcatgccaccgcggatgagaggctcagtcggtgtgccaacgtgcattcagcgccgtgctatttggtgctggggtgtctaaattcagcgtcatacgatttggcgctgaacgttattttttaaataagttttggccgcgatttatttataaaattagtttttggaaagggtcaaattgtcaaaatttgtgtgaaattatccgaatcgaagttaacagcggttagtcacctacatcgatctagatagtcggtgttgatctacatgtgcatactgactacaactttgtctcgttggttaattagctatccatccgcaatggataagcaaaagagtacgcaaggaggaaagaagtgagaggggttattaatttcgtctgcatccggtccagctagggcaatctaagcatggagatcggccaggtgaaacaagcagccggagtacagcccgtccaccgctgctcaccggtgcccaaagggagacgggcgtttgcgatgaagcggcacatgtacgcaggattggggacccacgcccacgcttgcgacatcgtcgtgcgcaaccggttcggcgtgtggtcacggcgaaaccaaaagtacatcaggaagacgcggtatttcaagttcgtcgcgctcggttcggcgatgtccaaggtgagacggaagctccaggagtggatcaagcagcacggcttgttaacgtgggctcagtactcggcgcggcgggaggagttggaggccgctgaggcaggtctgcagaagcttttccaccgtcgcatgcccgctcggtttaggaagctgaagcggcgagtcgtgaaagagcgcgagtgggagcggcgtctcttgttgaagaagcaggcccacgcggcgcagggtgcacccataacacgcgccctattcgtgtatatgtcttcatgtctagttcaactgttttactatctgagaagacttatgcttggtagtgtcacgcccagaaatttccgaatagaatttcaagtaaaatgtgcattaaaatccccgtccaggaccggccggggtacacaaacgacaaagttgacatacagatccatgtcttacaaacattataaaagtcttacataaatgcagcggaaaataaaaagataactggagctaagccttgacttgcaccgcagcgggaacaccactccacaggcatcctcgacggcacggacgaagcctactcggagaagccaccatctgacgcatacttaaactttggggttttggggaaaatagagcaagattgagtactacccactgtactcagcaagtcataccggaataggggtatgatgcagggaattatcaagggatagctataatggttcatttgcataaagcggtcatttataaccagaagttgaaagtagtaaacagttgtaataattaatcaatattaatcatccactgtccaacgctataccacgttgcaacaggcccaaccatccacctatactattcaattccaaaagactagtctagggtgagtctaatcacggtgaatctggttgaccgcccataaccgcgggcacggctattcgaatagttttactccgatcagaggtgtacaactgtaccaacaagacacagccccacgacatgtttccatgcgccgacatgccaccacgacataccggaaagaggccgtgacaggacccttcgcataaccccctctaaccaagcacaccacacttcaggtttcacccccactcctcgcaaggcagcgggcagtcccctctcgtgcctaggcgaatccggaagccgcataggccgtcgcagggcccatccaaactccatcacgcccacccttgcctggatgcgtcggctagaggaaagctacactacaagcccagccgttgcccacgctggcttgtggtaagtacgaggaattcttccagggtttcccgcgaaccggtccttaattgccatgggcgcgaccatcaaaatcatgcacccacagcccaccatttaatatattttaattaagcaacaccagaacggtggcactaatccaatcattaacataaggacctacagtctatacattaatatgatttcccccattgtgtgctagttgaactaatcatggctaagcactccctagtccaatctctagtcatgttatatcccaagctaacaaaggaacatggtacaaaatagcatggctatgacagtaggtaaacattccacagtaatattataaaacaatgcagtatttgaagaaaaacaatagagcatttgcaatataggatcaacatgttcaagtgacaagcatgacttgccttgctctgctgctggaggaatctcgacgactatctcaaagtacaccggagcgtcgggagagccggaatctaagcgacatacaaagcaaataatacaaacaggctataagactactgaaacagagaacaaaaccatttttaatggattctacacatttttcttgatttactgagacttgaatggacttaaacggagctcggatgaattagttatgatttttagaagattctctgtgtttttactagtaaagaaaagtccttaatgaattattgcgcaataaagcatcccagggctgacgtcataggggggcaggcggcgccgacatgcgggccccacgggtcagcggctcgagagagagagggaggggcgccggcacgtgggccctactggcagtggcacaaggcgggagggggtgcggctggcaggcgggccctaccggtcgcggctccaaaaaggggggggtggcgagacgccggccgggcccgacatcaagccggccggcctgccatggcaagggcggcggagcgcgcgcgtcgccagcgacggcaaccggcggcggaagacggcggcgcgaaggcggcggcccgacccggctcggcgctaggagggagaggaaggggaaaagaggaggaggggcgcctcaccatgagttggccggcgcgggggaagacgacggcgaacggcgacggcgacgaccggggaaatgacggtgaacggcggacgggctccgagacaccctaagagagaaaaagagacaggttagagggagagagggagtccatggcgagcgggaaccgtggccgacggcggcagctatggaaaggctcaccggcgcacggcggacggcggcctccgatggcggaattcgacggaggaggggtggacgaggtggagctcggccacgcgaacccgacggcggcgacggcgtggtgcggcggcgaccctagcggcggctagaggcggctggagcaatgaaaaaaaggcggcggcgggtgggagcacggtgcgggagcgatggggagcttgggagaggccgacggaaaaaaggaaaatgaggaggaggatgtggggatgaattatataggggcggagaggtcgggaacggccgggagtggctcgatttcgccggagttagtgggggaagttggaggtggggagagagagagaggcgggattcgaatttgaatcccgaccatctcgtgacgtgggcgcgagcgggagtgagggcgtggacgcggggaaggcggggcgtgtgggggtggggcgcggggaaggcggagaaggtgggcggcgcgcgcgtggcgtggctgtcgccggctcggggaggcggccggaggttggggaagggactgacaggtgggccccacctgtcagcgcccgagggagatagggggaggcggcctggacttcgggaggagaaggggaagcggaccggcccgatatgggaaggggcgcgggaggaggaggaaatgggccgacagcccatttggggaaaagaaggggaaaaaaggaaaaaggaaaagaatttccagggattaaatattgcttgtgctcaattttaattggttaaaattatttctagagctctgaaaattccactaaaaatcttgttagcgtatttcgacatgtagaactcaagaaaaattccacatgccaaatccgattattatttgcattaattcattagggttttctcttgcttttacaccgatattttctctggtggattataaattcaatttaggcttgggaaagaacttcagggtgtgacaggtagcttgtgaagttgtatttggataaagtgaagacaattaatgtgtgtatttttctatttcttggtatctccaaaaaaaattatatatggaatagtactacatgtaaaatctcatttacaactagaattgttactataagagaaactcttctttaagagaagctaatgttttttttttttccataagggactttctagaagtacagtttgttaaatgtatacaactacaatggtcgacgttccagttcgcatgcacacccagcagcccagaatgaattgaacccgtggtcggcggcggcgcatcccgccggcaagccaaaggggaaagtttcaccggagcaaacgcaagaccgattcgtcacgggctcgcggctagggcatcctctagggttcatgataccatttcaagcatcctcatggcatggcgcggcgcatctaggtggccaacggcgaattagcggcggaaccaggtgaacacgagtgtggggaaatatggcgagcaacaagacacagcggtaagctagctagctagtagcctttggaaggtgtatgagctagggaaaaaggattgggagactaccgagacgaagggcgcgtagtgaagaaatgccagcagagcggaagtaatcttccgacctcggcgcgaaccaattaaggtcggggtaagggaagacgacctcgccccagtcgccaggaacgcaccggcacctcgggcgagccacgcggtggacgagagcggagtggtggaagcgatcggcgagctctagggatggtgaaggagtggaagctaggagggagaaagagagccctggggcggctttcatagttcatagagctatcggtctggaggagaccgagccagcggtgtgtgccgagcttgttgtaaaagttagtcgatatagtggaacgacgactaaccttcccgatcgtttcagtcgttgatcgcccaagacatgccagatgacgacacaggaacacacgatatttgttaacgaggttcagccgaagcctacatccccggggctctgattatgggcgctcctccccaaccaacatagcacctagccgctacgagtccatggccacgccgccatcctctccctgcgtgtctacgctacattgtagtcgtcatggttacatcgtggtgcccccctctctatttaagagagttgccgggttacagagtccaactctaactccacccctaacacctattacaactccaagtccaactgtaaccaaataggactagtatattcgacacctattctaacaaactccaccttggaaaatatacgtcacctagaagtagtagaatcaccatgccgatccacctgtcctccagacttggattatttccttttgcagcttcaccacgagccgcccgacgagcgtacaccagactcaccgtcttcaagagactccactctccctgtaatttcttcctcttgactccacctgcaacagcgctccgccttctcatctatcatcacggtcgtcttgccaagcgaaattggattccttcctagttgtcccatcatagactccccaaagaccatgttcacctccacattccgtctttgatttgattcaatctaatccatggccagataaccaatgtcatcactaaatagacaaatcaaactcaccaggcatgaagaactgaaccctttcttccttgttgtcttatgaaccaagctaacaaatccaacatccacgcttcttgcatctgtagactgaatccatgatattttgagaaaattcaccgtcgcctcgaatcacttgaagaattaccatgatagccttcgctcttactccttcagtgacgcagatttccatatatcccatcatgccgacccgcatattctggatatatcctgtactgccaaacagtatcgttgaccccatcaacgatatttgacccgatgttgcccgggacttctcgcatagcaaaccacccgtttgccactgccgcaccggtccaaccaatctgctacacggccggtctacctccgtcctgcttctggttcggtccggccaacactctagcatactccttgttcctgagccatacctcgccaccttgctgagcaacctcgtcaccgtgagactatctctacagagttcccaaggagccttctcgccaagtcactattttgcgccgatttctgccaattttgtgccatatcgaatcttcccaagccagcttttaccattgcccaagaaagtcccagtcaaactgaattccaaacaaccgagtctgactctgatggacttatgcaatccgattgcacaacttgactctaatggccacagaaaaagatacaactcagccaccgtgtccgcctagacctctgttgcgttttcctcacgtccaacttcctctcagcaaatagcttgccacaccacgctcatacacaaattatgcacctgcttgcatctagcctcccatgcattagggcctttttctttccgcttaggatttattataatccagcttattagaagtaagctgaaagaaacaggaagattatttttacagcttattataatctagatgatgggttattgtaatctaataagctcaccaaagggagctttttctggattattagatggcaaaagacccactgcccctgattaattctaattatttacctgaattgccaccgcgtaccgcttcgtttctttttttcgttgaccgtgtgaccgcttcgtatcctgcgcgggagtcgcgagatcccctttcccctccactttctcttcttccaccgagaagatcggcaggcgagggggctgtgcgacggcatcggcctaggcgagcagagggcgtccggtgcgcggcagcagcgaactcgggggcatgctgcgtgcggcggcgaggtccatagcccattccgacggagatggatcctgcagatggtgaggactccctctcgaaagcatttcgataccgtgatgatgtggtgaataagcgatcccaatcaggaggcaaccatggcgtctctggcctacatggctccggcagcttctctgatggattttggggcgacggcgtcggcgaagatggacatataggcgatcttcatggctcacccggcgtccacggccaccatgtctcgcctgccccccatggcgccggcagttctggcggatcacccgtcttccatggagccggtgccgggcaccgcgacgccactgtgttccaagcggtggcagatgtgtctccccctggcagaggccgtggacggcgtggcgggcatggtggtggacctggacgtggtaagagatcggccacacaaccttccgcacgtggtggccgaggaaacaaggtgccatacaagccaccaaggccatccagcagtgcaactgttgtcggcgacgccgagggagcagctggtgtagacaatgacttcacagaagaaacaatggacagtgcgcctcatggaatggtacgtctacttcatttctctacttcaaaaattaaggtttaatgcatttatctactgcaaggattaggttgaatctaattgaatttaacgtgtatgtgtactacatatgaaaaattaatgtgtatgtgtctatgctaattggtcatgtatttaccatttctaatatagaaatacttgtgaatatataaacactagtggtgtaaaacaacatgtaaatctgaaccttgatgtgtttgatttatcaaatagaaggaggagcttgataaagcagattggtctagcacacacaataggatattttgtgaactatgcgtacaacaaattgaagacggcaataggcctatcgggataatgactactagatggtaccagatcatagccaaaaagtacttccaaaagacagggctaagacacaataagacacaactgaagaaccggtgggatgtgctgaaatccatgtacagcttttggcttggtctccttaacgacacagggcttggatgggatcatgcaaaaggaacagttgctgcacctgttgagtactggaaaaaagtcaccaaggtaataattcatgtctcatgtacatgattttcatgaaaatgttttaagtgcttgcaataattgaagatttgatgttttatttttagggacattctgaatggaagaagctacaacatggaccaccagaatgtttagaattgctggatgaaatgtttggtactattgctgttgatggttcttctgcttgtgcacctggagaaaatgctggaggggatgatgcaagtggtgatgtacaggaccttggcgacacaccagtagattgctcattgggtaaaaaaccagtgaagcgagggtcttccagcaccgccactagtccatacaagaaggttaagaaccccatggttaggataatgaggaatattcaaaccactatggataccaattgtgatattgccaacaaggtgatgcaaggtgaatttaggttcaattccattaaggaggtgatggatttggtggtggattgcggggcagcagaaggaagtgcggagcatttcatggctacaagattatttgtgaaagctgaacatcgtgatatgttcaagactcttaccaccaaggtgggaaggctctcttggttgcagagatggtgcgagaaggaagggcagcagtagaaaattgctaattatttatatgcatgaactagttatctctgtttttactttgtcagacaatatgtattagcaagattgctacttatttattcgcatgaacttatgtactgcctggccatgtaatatggcgccttaattttgattggatgaactactgtttagtgatccatcaacatggtctttctgtgactattgaggtgatatcatttgttgcattgtttgtagatgggcatgtatggaagtgatgatgacgatgaggaggaggatgaaactattattgttgctagcagacaactagatatgatgagaaaatttggaccggtgttgacatcatttggtatgttctacgctgaaaattatttgaacaagtccaagtatagaaaagctaatttagcgggtcatgcttgggttatgagaaaccttgaagttccacaagattgttatgacatgtttagaatgagtaggccactctttgagaggttacataatttgttggtctcatcttatggtctgaagtcaactagtaagatggattcagttgaagctttagaaatgtttttgtggaccattggggctccacaatcatttgttcaagttaagaaccgatttgagaggtcaaaaggaaaaattagtagaaaattcaatgaagtgttgcagagtatctatctcctttcaaaagatcttgtcaaacctagagacccaaacttcacaactattcacccaagactacttgatgatcggtttgagccccatttcaacaattgcataggtgcaatagatgggacacatataccagtagttgtgcccgcatcaaaggtggttcaacatgtgggtagaaataaatatccgacgcaaaatggcttggccatttgtgactttgacatgaggtttgcattaattgttgcggggtggcctggatcggcacatgatatgagggtgttcaatgatgctttgcgcaaatatgccgctatcttccctcatccaccacctggtaacttctcttatccgtttaatagtctcgtcgaactagcatcaattataaaataatgtctcatggtttatgtttatgctaacagggaaattttaccttgttgactcgggctatccaaatcgactaggatatctatctccatataaagggaccaaataccatttaccggaatttcgagagggtccacgtcctagtggcaagaaggaggtgttcaaccacttacattcatcgcttcgtaatgtgattgagcgctcttttggtgttttaaaaatgaaatggagaattctattggacttaccaagttatccaatgctcaagcaaacaaaaataatacatgcttgcatggcgctgcataattttattcgagatagcaaattgagtgatgaagagtttgatctgtgtgataatgatgaaaactacatgccgatgccttcatctcaagggaatgccagtcacatgggagacgaagatggggacgcaaatgccttccgtgatagtattgctgatgctttatttgctaggagataataatttggttttaagtctaatatatatgtggaagaaatattcatgaatgtataattataaatatttgtcaaatttttatttatctacatcaaatttatatctattgtataaagtcaccgaatgatgacaaaggcatccaaaaaaatagttgagggcattctagactttagccatgcaaactcaataatccaggtttccaataatctagagaaagaaacagctcacagcttattttcctctagcttataataatccagcttataataatctgactcaataagttggattataataatcctaagctgaaaaaaacagggccttaatctcagcactgtaacatgcagcttgtgcatatgcctgacgaccaccatgcactagccatcctatattttaatgcatgcagccatgatgattgtatacaaatcgtgccgcatgaaagtgtcttctccgatccatgcgatttgctcgactccgttcaagttgtacgcaaagaacagcatccgtactgttcgtctgtacctccgcacgcaccgcagtcgcagccctcgtgttcaccgtctacgaccccgtcatcatcggccatgcacgtccgccgcgccgcgccacgctcgccggcttcgcccttccatcactagcctccctgccgccgcggatccgcgatcgccgcgtgcgtcgggcgcgccgtccatggcgctacccctccgatctctccgaacgccttcggccacgcccggcctcgtcttccagtcacgctccgccatcgtcggtctgatcgcgagtgaggtcgtcgcctccgcaacgtcctcgttgtcgccatcgatctcatcgccatgactgacgatctcctgtcgatgcacgatcctcacctcgtgtttcctcctccacatgtcttctcgatccaatactgaaaccttctgctcgatgggttgtgtaggcccaggacctaaagttgtggctccggttgggcctgtggtgaccggagccacaactttaggtcctgggcctacacaacccaaaagactagtctgatgggtgaggaccgcccccaccttttaagtcgtgctcccccaccatcaattaccgatgtgggactaaacccaacaatctcccccgtcacacatcgggcccaataatctcccccgtcacatcaacccatgtgaccccgaagacttcttacctggcctctccaccatgtgacccatggaaattattccgggtttcaaaccttgggctctgataccacatgttataaaatttagtcgatatagcggaacgacgactaaccttcccgatcgcttcagtcgttgatcacccaagacatgccagatgacgacacaggaacacacgatatttgttaacgaggttcagccgaagcctacatccccggggctctgattatggacgctcctccccaaccaacatagcacctagccgctacgagtccatggccacgccgccatcctctcactgcgtgtctacgctacattgtagtcgtcatggttacatcgtggtgcccccctctctatttaagatagttgccgggttacagagtccgactctaactccacccctaacacctattacaactccaagtccaactataaccaaataggactagtatattcgacacctattctaacagagctggcgtggtcaaggtggggcgagcgcgtcagagcggcgacgtcatcggcgtgcctgcctccgcgtctccccgagctagaggacaaggtagaggcaaggaggaaaaaggaaaagcgcgaggcgaaaaagcgaggcctccctctgcttgactgcttctggtggcgcgactggcaaggcggactgaccggcgtcgacgccttggacactagcggcggggccatggtgagacgccggctgtgacggtaaaggcaggcatggtagcttggcgcctggcggcgagcggaggcaaggcggcggccagagcggtgactcgcacgcgagggcgggaaacggcgaggttgcatggctggccgcgctggcgagcgagcgaggttgcctactctcctgcatgtgcgcggcagcacgtgatgagcagccgtggcgagtcgggctcgggcagaccggagcttcggcacgcgagcgtaagggagagggatctgctgggctgtcctgcttagataaagaagggagaaagcggcctgattggagaaataggcatgagagggatttatttggatgaagtttgagggtgatttgatttggatttgaaattggacgttacggagatttgattcaagtttgatatttgaatgtagggactactcaaggaagggaaacacggtgggactcaaatattttggagttgtaagattacttgaaacgaggattggatttgaatagttgaaaggatttactgatagacttaaggagggaggttcaaacaagcaaatttaaactccgagtctatttcgaaacggtaattttgaggagtcaattttggttttgaaggaaaggagataaatagagcactcagaatacgagattttcacggataggtatttcatcagttttgaacgccacgtaaaaaacggggcattacactagctataatctcaaaagaattgtaatttagtaacgtttggtttggctttaaatccactattcacaggatgagaatccagagctgaagctttgtcgtaaaggacagtaatcgtgccctctggtaggcagtgcacctatttgctcgaaaacttccgtaagtttttttttttccttcaaaactattagatttttaaccattggattacctcgagatttgcgcatgaaagaattttttttctagaaataattttttacacatatcacgcgtaagaacatgatgctaactaatcaaaccatacttgaatacaagttttatataagttactatatcgtagttaccatgtaattacagtacagttacaatgtaattgtgtctcaattatatactactattgttatatgtgaaagtttttcattaaaagaattgagacatttttttagatactcccgtaccaaagttactaccactatataaggaaacatgcaatttatcaaaattgtagtaaaaactttatattagactgaaatcgtcttatatccgtgtgcatgggccataactttactcagtttaaactagtttagcggccgtccatgaaatgggcctggatttagcctatataaaataggccgtacatgggccgataattggatctgaacgatactctgaatattaaattctcgcggagatgcgtcccgcccgcccgtgacgcgtacagccgtacacccattcctccacgctgtttgctccccgcgcgccacgaagtagagtactccatctcccaacgattaatgccaagtcaacaagcaacaattctttttgtcgaacaccagcaagcaacaaatcatccagtcagcccgaacacagataatgcagccgtcgcaacgatcccgccggccaccgaggttgagccgccgcaatgccatccggcagtcggcgtacgtggcccggccggcgtcacagctctcgccgccgtcggagtcggaccaacccgccttctggtattcgacggaggaatccgttctggaggaaagggttgtggaagatgaggtcggagatcatgcagaggcaggtggagccgaggcggccgcattggtggtggaggaggcgtcgacttcgagctcgtctgcggtctctgtccacgcggctatggtgatcaggaggagcatcttgaattggagtaagctggatcttatcggggccggatcgtccggcagggtgtacaaagcggtggctgagtaagtccgcttgcgatttaccgtttgccttgctcatgaactgttcgatgcaatgcttcattgtacttcgtgtctggttgtgtgttctattctttcagcagaccggcaatttcggatgagttatctctgtatttctcaatgcttcttcgtattattgccttgtcagggatgggtttgtatttgctgtcaaagaggcttcgttgattggtcccgaaagctatacgaagcaaaccgcatgtcagctaaagcaggtagttttatctcttatcaattaattaggtgaaaaattatcttgtaagtgtttaattaagcaaattgcaatttttgtcaggggtaaaatttcagagtattgatgttctccaattctaaatgattccaagtataagctaattcagtattagtaacaacatttcaggaaatcttgcttcttagtcggttggagcacaagaacatagtgcagtattttggtgccaaaatggtatgccagttctcatatgctagttgaacaagtgtcttcattatgttgctgatcgcctctgcaaactgttgcctcccaaacaccttcattttaggttatttttcttcggtttgagcttactatccctgtttggatttgcttgcagggagaaaccgtgctatgtattttccttgaatttgtgagtgaaggttctttggtatctgtatatgagaagcaacagctggaggaatcaactatatcatctttatacaagacagatcctcaatggattggcttatctgcatcatcataatgtaatgcataggtgataacacattatctccacaaaaaaattcttgctgctggcccggtcatttgaaaatgtacttgttatagtagtgatcaagttaagtacagatgtacaactctcgatcaaatgactaaatgagtgaagtacttctttgtcatattatggtaaatctgcactgtccttcccttttcaatgcagagatattaagtgtgcaaatattttggttgataaaaatggagcagtgaaggttggagattttggactggcaaaggaggttacttcatttttggtttcagtgtccttttttcccctggtttgactgacagattatgaaatgattttgtttgatattgacgatgtgaattctcaacccttttaattgatgtaatgccagataaaagtctggaagcagaaaagatcttgtaccggaagtgtatattggatggctccagaggtaattgtttgacttagtatttatacatagagttttgctcccatccagcaggtaccatcgggactgtccggtaccaaatctcagccatttaatcagcgaaatcggacggtggaaaataagtggtacctccaggtacaaatttgcccatgaggaggtgctaaaaaatttcgagtggtggaagggtaaatttgttttttcgcgtaggagtgtccagggaggcagtggcgagttgcttcgtgcttcgtcggcggcggcgagttgcttcgtcggtgacgacttgcttcgtgggaggaggcggcgtggcggcggctgatccgtttgaggctgcggcgtctgatccgtttgaggcggaggtggcggcgacggcggtggcggcaggtggttcgttgcggcgaggttgtgttgggcgcagtggtggcgggcgcggcagtggcctggtgctgctggtggcgggcgcggcggtggcctggtggtggccacggtcacgaggtagcggcggcggctggtgtgtgggcagccttggctgcgaggtggcgacgggcgcgatggtgccggccgtggtgatgaggtggtcgtcggagccggtgttgtggcggctgcagcgacgagatggtcatggagtcgtcttagcaggcgatgtggcagtgtatacatcgatttcttttcatccgatctaaatcattaggttcggttggttgcagcagtagatactttcattttctgggctgcatatactcttcttcttcattgcttataggatttgtattgtacgatttattggatgttttgatgagctcaaccattacttgttctttgtgaatgttcaaatggccaataccctcccatatcatttactgattactgcaattcgagtaagggcgtgaatgaagccgctggtgaaggagctcgctggttccgccgccgcggatggcagatgcggggcgagcaagcgagcgcacaggcgggggcatggatgcggggtgagcatgcgcgcggctcaggtgggcttcgcacgggtggggctgcgctcggagggaggaaaaaaaaggagattagatgagaaagcagcgccacacggagggaggaaacagagaaagagcgaaaaagagaaagcgagggtgcgactcctttctctgtttcccgatcgtacccttctaacatggacggatggatttatctctgtacctgccggtaccagtacctgccggtacaagttgctggatgggagcaaccctcttagacatattagtatgaagtatctagataaacgttactctgaagaatttattgcacttttactttacgatagtcgtccaactttccggaccagcagaatctatattggttatctgaatatctgatgatgatcaggttgttcgtggcaatccgtatgggtattctgctgatatttggagccttggatgcactgtcttggagatgcttacccaaagaattccttatcctgatgataactgggtcagtaaatcctacagtactcatttagacttcttacagtctcttcaaattcgatactgattcagttctatcaggtatcagtcttctaccaaattggccgtggtcaacttcctccagttccaggctccatatcaccggtgtcacgcgatttcatccacaaatgcttgcaggtgaatcctgatgatcggccttctgcagatgaactgctgaatcatcccttcgtggctgttccagaaccagactagtatgctgcatgtttgcttaacattgctaggcgaagaacattcagtagctccttgtttccttcctgtaagttcagggtcagaaagtcagaatgcttgtggttggaaattcatagtcctatggctaatttcacgagtacttgtttgtacgacatctgttccttataaaaatatcccactatccaactttgcgactttgaccattagttgggagagcaatcaaccaatcatgtattttatggttgagacttacgacgacttgctactccgcgtctgcatgtctgagtctgaagtctgaaccgacggcgctgacgttcccggtgacgaaaccaaacagccacacactctgaatcttacaagcaaagccaattccgcaattcccacgacttggtactcggagatagcggttggtcgtaacgggagcagttagccagttaccgatgacgccgtctcgatcgacgctcgggtcgctctcggggtacggggagggtagtcggctccacgccgttataaaaggccctcatccgcaacgcgggtctctttccggcgtcgccttgtcactcgctcgccaccacccctcggcgccacggcgagcagcgcaccgggtccaggtcaaaagcgcacgcacccacatcgcacggccgcgtcgccgtcgtcgcgcgtgagccccccgtgcctagtcaaaccccaccacgagcagaatcccccaatcttctcgcgatccgctcgctctgctgctgcgccgcgggagcgcgggggaggaggaggaggaagagggaggggcactggccatggcggcgcgccagcggccgcaggcgcagctcgcgcggatcaacgccatgaggcactcctacaccgccgcgggggacgatggctccggggacgacgtgtgtggggagctcgacgacggcgggggcgagtacgcgtcgcagaccagcttccgcatccgcggggggcgcggggccgcggaggtcaccgccatcttccgcaagctggggctctccgggcccgaggacttcaccatcccgcccgcggtctacgccgccgccatgtcccacctctccagctccgcccgccgccgcgcgtcgctcgaggtggcttccccgccggagcttctagaagcttctccagccgaagccgcggttccgatgaatcgggaagcagtcgagaagggggaggaagctggtccggcccccaaattggttcaatcagaggttacagaagtttccacacgagcttatgcaaatgcaacgcctgcagcagaatcgagcatcagagtagtagctccatcggccaccaaatttgttcaagcagaagctatagaagtttccacacgatcatatgcaaggcctgcagcgagcgtcagatcagtagcttctaaacgagctctgctgaagcaggatagtgcagacgaggacaaggagaaaggtaaattggtcagattggataaatcacgagaggaaattagaggagaggtggttgtggaggcgacaagggagaccaccggtgcctcggctctggtcgtggaggcgacaagggagtccacttcacgtgacatcgagcatttgatttcaccctctcctcacaggcggtttaggagaaccatcacgtcctggcttaagggagagcatctcgggagtggatcgttcgggtcagtgtatgaggctatcagtgagtaagtatcgatctgcctactctgtcttgacgattgcataattcgttttcattatgtttgttgttaatatgtttgcatttgctactgttttatgagaggaatacaacgaagaaagaatatcaatggttttggactatgcagagaaatcagaatatgtcatctgtctagttcacttaattgttggtatatcagaatgagtattagcttcatgtgtccaccgaactgagatttcacaaattggctgcatccatttcaacttgttgggctatttattttatgccgggttgaatgaaatacttgaacatactgatgcaacatattatctgaatcatgcggctagctaaatttcttactcagtgcttttacacttcatttggcaaatttaattatttaggtgaacccttgtgtagttcttttgtagcactgcgtggattccatctaaaccactcttggaaaatataacttctgtcaacagttactatatagccgtgcctcgttttgttaataaaaagcttcataatcgacttttaacatttattttacagtgatggttttttcttcgctgtcaaggaggtgtcattgattgatcaagggatcaatgcaaaacaacgcattgtccaacttgagcatgtgagttaccctgtttcaaacattatgtttgttattgaactatttaatatccaagcaacaattgttttgtttcaatccactgagaatactggtgaatcatttggttccaggagatctctctgttgagtcgtttggagcatgaaaacattgttcagtattttggaacagacaaggtaatcctcctttcttatagatgttaattccattaagattacagttgtgaatgtattcttttcgtttgattttaatattatgttgcttttactctgctagttatcttcatgtaaacaacagttgtctgacttgagttgctgatttcgacgtttacgtttactttgttggataaacattttacaggaagatggaaaactgtatattttccttgaactagtaactcaaggctctttggcagctctatatcaaaaataccgtttacaggactcacaagtctcagcgtacacaaggcagattttgataggtttgaactatctacaccagcggaacgtgttacacaggtgcattactataatgctctatcaatgtgatagtgtactctagcttagatgtttttattgtttaggatttgctcaactgtattcttgctggcctattgataccccgttctttcctatgttaccagagatattaaatgtgcaaatatcctagtggattcaaatggattagttaaactggcagattttgggcttgcaaaagaggtatttgctctatcaaatatctgatgtaatcaatttgtcactagactacatgttgccctcactctttctaatttggcatgtcccagatgtcaattttgagtcaggcaagatctagcaagggaactgtttactggatggcccctgaggttagtctcacagttatgctttggtcctttttgtacaacccatttaccttacgctcctattcagaagagtgtaggtgctttaccattttatgttttaagcatatttctatgcctgatctattatgttcatattgttcacctctttatacttgtaagatgttgcatggacacataattgtatctctgtggtcaaaaagtcacggtcttgcaagttcaagcaatattttgcataaagtggtatgtgtctccatattgtaccgagcgtgtaaattttctgatagcatgttctcattcaggttgctaaggctaagcctcatggacctccagcagatatatggagtcttggctgcacagttttagaaatgctgactggcaaagttccataccctgatatggaatgggtgagtatatctcttgtcttactttccagtaacagcatcccatttttaaataccaaatgcactgatatacgcgggctgcacgctatttaattaaaggagcaaaaacattgatgacaacttcttcatgttgatgacttgtttgcttacatcagtacgtatgaagtatatctttttgggaaaatcaaacattagtttcatcaggaaaatttgggtagtattggatttaaaaatgtcagtaggaaaattaaacatttctattcagaactgcaaacagcaaatccactgtatgttgctgtgttaattttcttattatccgggaatttgtattattactgtccgtgatgcagtcttttcttctgctatgtagacgcatgctttgcttaaaattggtagaggaataccaccagaaattccagctacactgtcagaagatgctcgtgatttcataattaagtgtgtaaaagtaaatccaaatgatcggccatctgctgctcagctgttggaccatccatttgtccagagatcactgcaacataaaggcgcctaatcactcttgtgttgctaacaaacttgcttgtacataagctggtcagtattccattctttctcatacaaaaatttcaagaaatagggcgctatgactatgatcctgtattgcaaacattaatggatttctctctgttgcatttcatagattttaattttacctgtggaaacaggaaagctgttgatgctgaggatgatcccaaatcccttgccatgatacagcggtagtttgtaggaagtcgagcttacagcatgtgcaagctatattcaactgaagatacctttcaggctgctggatcatgtgaacagaagataccttgtcaggtgtttactccgtgccttcacaaccatcagggtgaacagttggttgtccaaagtttttagtgctgattgtcagggattatgagttccagtgcgaaccatcgaactacgtttcatgacttggataaaaactgggaaaggttcaaaaggaggattagtggtatctcgcctagtggcctatggaagcagccaagcaggggacgtagaaagctcagtgctcacggcacagttaacttttctgaccgcgtttctgtacagcgtttttgtacctgtaaagtggcttccttgtgtatgtcattgactgttgacgagaaaatccaatttgttttatagccataccgtgaaattgtccagaaaaatcagtgtgttttgcgataattcaattcatgttggacttcactcctgtgactacacagatgagggggaatcatagtggcaggacagctaaatgtactgaactactgatatacaacagttctctaatctaacgtcggctatcttttgacttcagaatatcagtcttctgcattctccagtctccagggtctgaattcatcccccatccaagcaatcgattacatggtcataatcatgccctgccatctcatgcatgagcaacccaagcatctgagatatctcctccgcctgtggatgcgaccgatcgccggagacgaactcgtgcacgtcgccgtcgatctccacggcgctgtagcccggcctcttcctcagcccccgcgccttcatcaggctccggaccttcccggcgccgtcccacttgccgacggcggcgtagatgttcgacagcagcacgtagttggcgtcgccgccggggtccagctcgagcaggtgctgcatcagctgctcggccatgccgacgtccccgtgcatccggcagccggcgaggagggcgccgagcaccacctcgtttggccgcatcggcatggtggtcaccacccgcatcgcctcctcgagctgccccgaccggccgagcaggtcgaccacgcagccgtagtgctccatccgcgccgcgatgccgtactccgccctcatcaggtcgtagtatcttagcccctcgtcggtgaggccgccgtggctgcacgccgtgagcacgccggtgaacgtcacggcgtccggcttgaacccctccctccgcatcgcctcgaagtgctcgacggcgtccgcgcaccggccgttggcggcgaacccaacgatcatcgagttccaggagaccaccgtccgcttcctcattccgctgaacacctgccgcgcgagctccacctgcccgcaccgcgcgtacatgtcgatgagcgagttggctatcctgacgttgcgctccagcccctgccggaccacgagccggtgcacccacatcccgagccccagcgcgccgacctcggcgcacgcggagatgacggctatcagcgtgacgtagtccggctcgacaccgtccagaagcatggcgcggaagcagtcgatggcctcgtcgtggcgcccgttcttgacgcacccgtcgatgagagccgtccaggagaccttatccggcgccggcattccgtcgaacacctcgaacgcggcggcgacgaggccgttccgcatgaggccggagatcaccgtgttgtaggtgacggcggacctcacgggcatggcgtcgaacagctggagggcgaggtggggcaagcgggacgcgaagtagaagcgcacgaggcaggtggagaggaggaggtgggaggggaagagcttgagcacgcgggcgtggacggagagcgcgaggcggcgggcgagcggggaggacggggagtcggcgcaggcggagaggacggtgagaagggtgacgtcgttggggacgggcgccgcgggggaggagagcatggcggagagcgcagcggccgccgcggggaggtcgccctgcttcgccgggcgcgcgatggcggacgtccatgaggcgacgtctcgcggcggccggcggcgaggtttaggggttgggttctgaggaggttggggaagggcaagggaaggaggggctacgacggccatgaggtaaggtctatggctgagggctgaggcatttccccgcgggcacgttggcacggagcctttgctctcccctggtttcttcaggttttcttcagaattcatccccttttatcctggtttcattagcatcccaatgatatgttggcgatacaattcacaacatatatagatcctgttcatttctccaacaagagttggataaagataaagattttcatggcacggtttttaaactgataaacagtatgtgtcatgcgaaaactttctatatgaaagttgctctgaaatatcatattgatctatttttcaagtttgtaataattaaaacttaaccaatcatacgttagtatcacctcgttttacgtaaaaaaacttaaatcttcatctacacctttatcttctaactatgcctgaataaacacaacagtctggttttcagttgaagactataaggtacgacgtgcatatggagccacaaaatgaaaatatgcagaaaagagaaagcaacatactgccaatacgagggggcaagccatatgcatcaaaaccacaaaaggaggcaaatcaaagtctaaatgatatttttgaacttccttaacgaaaagaaattacatacagcacaagaagcatcttgcactagataattgcgcacagctgaacataattctgcagtccagttcttcagtaaatctagtgaaagtcagatacagaagaaagttgcttaagggaggtgtatggctggagggcagattcattggaccatcggatcagggttcccagctgcaagtatgtccagcaacgagttctggggctccagctcttcatgccacagttgtagtttgtctccagggtgaaatttcctcgaaacaccatctgcgtttatctgcaagattatcatatccataagttcaagaatcattggtctttcagaaaagtaatagcattttaagcaaagataacaagacatgcctcaacttaaaatttactttgccacatgctacacattttcagaaaaaggaagagctacaagaaaatgcaatcaaagcaaatagatgcccaacaaggacataagaaaatttgttactaatgcttccaatcatccaatgtcttgtctacaataccctaacacattttagtaaaagagtaaaacaggtctgaatgaagtataagggatatatcacactgaaatattatccatttttggcaagaaaaccagtccatggaagttaaaaaaggccaactttttcattttaagtttcatctgatactatattctatggccatcacagcaaacagcatgacaaatatagcatagaaatttacatgtttgtatgaagtcaactaaagcaatcagttccggtatctgatgtttcaaaatatctacaacaagggaacagacaatgacaataaggacgaaaaaagggagcacttacagtgacggtacgaacaacccctccactagcaccatcacgggctatagcaagggaaactaccttaaccacaaacttctgtaaagatgaagaggaaaattaagtaataagagatgtgatgcagccagcaatattatacagggaacactgaagtgatggaaaatgatctttgcactctatgaatctggacatataaataatttgtgatattttcattaaatcatggcaaaaatgctgacaaactatctcttattactcatggattacgactgtttgatatttagatgatgtacctcagcttcttcctgggacatgccctccttccattcgtggtcaagcaatccatagaggtaactagagcctgaacctgcaaaactcagaaatagcatctggtgtcaggcaaacagcaaacaggggcttgggaaaattttatagtcaatgattataacagggcagggttgcacaggacagtgttggtaaacaaaaaagaatgaggcaagctaattcaagacatcaacaaataaagaaagaaatgaatcttgctaactgcaaaagattgcttctgctttgcttgaaaaaattaaactgctcaggtaagtttgaaaaaaaatatctcataactaattggcttatactattgaactgacaaattattcttgtacgatatgtagatatgttatatatagacacaaatgttggtgggaaatatgtttcccattagattactctgagcccaatgaagagacatttgccataatatatatacctccgattgcaaatggttgcctcagaattgttccaccaagggggactgagaaaatttggcctccctcatatttatcccatccaccaacaatcatgccagcttgcaacatgttctgaaaaataaaaaaaatggtaaaaaaaaaaccattgcgacaataaaacaacaacttaaaatcgtgtatcagagaaaccattgcgacaataaaacaataacttaaaaaatcgtgtatcagagaaagaatttcatctcatgtagtcatggagttattggatcgcagaatgctatagaaaatataccttgttctgataagccaacaacctaattaagttggctgcaactttcacggtagctggctgcccaagctgaattctgaaaatggagggaaaatttagcatgaactgtcttgcacatcaaatgtttccagtaactagtagaacaatatatatgaagagttcattcaacttcttcctattcgcttcaaggggacaacttacgtgtgttggtggagaaaatagcgtacataatcggaaattacttgtgtatcagcagcctgtgagacagagagaaacaaatatttacatgtgaatactactggactcttggaaatgccttagctgataataattagaagccgactactaacaactacagaataaatgaatcaaagtaaaatattgacaatgagagtgtaacttatgagagggcaatgaatgactgggaaaaccgatcaagatgacatgacacagtataacaaaagaacatatataacttgatgaataggaagctcgtgatttcccaatatcttatggccacagtacaatgagacaacatgaaaaaggagtaaagtccctaatatagatacttacagatccagagcggcagatgtacacattgtcagttagctgagtaatcttgtccgacgcacggtttgccacatacattcctaagaattaataccagacaacaaagggtatattaaaggaaagtaacaaaaaccaacatagtacgtcaacataacatcgatttcagttggttcagaacatgcacatctaagataacaagtcagaacatcaaaatcatctaagaaagcttgttaatcatgtagacacgagacccaatgttctaaatttccaaaacagcaacatcacgctaaacaccaatcgtgtacacttttctgactcttcactcttcagggccaaacgagaactatatggacagaaaaatacaactggaacaattggtgttgtttctagtttcctctaatgctacagtcacgattttttcacatatctgccatacaagttttagcacgcattctactcgtcacatacagatttaagcaggataaattagtggtaagaagcaattttccatcaacactacattacgtgatccactgtggacgctatatatatattacaactaataatctcataagtcacaaacctaaaacagtaaaacttgaatcaggatcgcagaggctaacaatcactactcctattccccccatcccccgcgattttgcatcaaaattgggcccgcgacgccaccggctccacgttaaaccccaaccacatcaatggaagagatctcccgcatcgggaggtgtcgaggcataccggtgctggttctggaatcggcggcgaggacgacgccgccgtcgtagcagacgccgacgatggtggtccccatccggtgctccccggaggtgggattgtctcccgctgcggcggagggggcgcccatgagagaggcgtccatggctggccgggggcgggggcgagatcggcggtggcggaaaaccctagcttagctgcgcggcggcgagatgcgagtcgaggcgctcctttcagtcgcgcgagcgagaagagaccagacggcgagagagctgtgtatgttacggttttgggctctggtctggcctcccccgcaagaaagaacacgaaacggagacgagacgaggacgtgactgggtcggagttgtcgcgtgctggtgcggttcgacccgatggcaccacgagccggtgcaaccacataccgacttcccgagcccgaccgaggtcgggtcggagatgacgtcagcttgacgtagtccgcatcgacgatatcccacagcataactcagattcaacactacttacttccaaaaaaaataatttacatagtatatgatgtaacatatactacgaatcttaacaacttgtattccctccattctaaaatataagaacttatttgatatgtagggaaaaacaacaattttagaggattttaatcatataagaatatttcatatggatgcctttgaaataaaggattgaattcctatcattttaaaattcctatgaaatggacaatcctatatagattttgaaggaaacttgaaaagagctctaatctattgaagattttcccttgagcctatccctctcatctgactcatatgttttcatgcattttgcaatcctttattttgtagttgaattcatttttgttttttccatgcctgcgatccaaagagtccctaaaggattttgatcgaatgggacacatctaacactataaatttggttagaacatcctagttctactaattttgatagaacatcttagcactacgaaattggacaaagctattcataataatatgatgtgtcccatctaactaaaatcacttatattttgggatatagaaagtatattacatctcatattatgttaacttattttgggatgaagggagcagagaaaaaaaaagttgcaatgtactctacaaaaacagcattggaggaaactgcaagcactaaacagatatcacaaccaccttactgtaaacaactgaggaggaaagcaatacacagaaatcaaatgcattgattaaaatcgatatacatatttcaccggttgatccatacagcaaaactggaaaaaataactcttcaatttagtatttacaaaccaagactctgtacatcacctgctgaatgttttacagccatttacatgtacatacatcagacgacccatactgtacattggcaagaaaatacgaaattaataaatcgaacatgttggcattacaatttacaactttacatagaccgatcaactatgcctgaataagtacaccaatctggttgtcagttgaagtcttgaagccgcagagaaaactcaaatatgcagaaaagaataactaacatacccccaatatgaaggacaagccccatatgcatcagagccacaaaaaagaggcaattaaagtataaacgatattctttttgaacttccttgatgaaaagaaattacatatcggaaatgaagcatcttgcacttgataatggtgcgcaaatgaacacaaccaaaaacctgcttggctgcttcatctgacgtttcaacaatcaagttctgctcatgccaacaacctacaaagctgagcaacctaagaaaaacacagcccttcttacaacagtcaaatctgatccatatctgacaacaacgttggaagtgttattgtccaacctgaaaacatatcaaggcttttctgtcgtgctggtagacagatccaatctctcaaacctcagtattaattctaatgaatttggacttcatatattctaccacaagctcattccagtctgacagggaagcaaatggcagcaaaccagccaagcatgggagaataaccgacaggacagtataaaatgtgtatcggcaaacccgatatggtaaatcagacgccttcgttctgtcagtcactgaaataggaccataaagcatgcggtataaaagagatggcctgctgttcccaaataaatggatgaagcagagaatctcccagaaaaagagccagacatttccatccccgcctagtgtgtcaacgcagaaccttccgacagaaccacagagaactcccaataacataacattgaacgttattggcatgtttggtccagtcattgcagaacgctggaatatcaaccaagcaatcaagagaatcattaacatgccaaatgacatccttgttgctgctattaaatgacacctgaaaaacagcaaacccgaattgaaagctgatactgaatttggcatccaccaagatttaggttcctgccaaaaaaaaagtgggttaaagagattagttcatagcacaaatatttactagcagttagtagcgaaaaatgatgggacatacccttgaagccgctgcacaagctgcagtaacagcagttatccgcttgtacgaataaatataggttccataaccaaaacagacagacataaataccactgcggtaaggagcaaatctataagcctcctgaggagttcagcatgtcttgtgtcctccatttgcgtcctaaatttttcctctctgaaagaagctttctgaaatcccatagaaattttgatcttctctagcatgtgtgagtatgagctgagagctatctgagattgcttcaattgcaatttcctcatgtttagtcctatttcaagttccttgagctcatttgaacgagtctgctcattcagagatctctcaaatacattaagaatgtgcctatcaaattctggactagctttattatgaggtagtttaaccaactgctgatcggtgcccgcatgaagaatgatttgattatccattgaacttaacgatgtactctcctggatatcatgtaccggcctttttgaatcagcaccactcaatttgatttcagcagcagaagtaccatcttcgtgagaaaaccgagagttatcttgctcatagacaggtgtctcattaattaaatgaagtgtcctcaatgtacttccaaatgatttctcaaagtttttcgtgaagttgtcgaatctatcaccatatatctgcagaataacgtaagtcagatatgtaaaaaaacctgtctaagtgtaatcacagacaaggaaatgaaccattcatacatttgtcaaggactctttcactgctgacgtgcacatctgcatcaagattcagagttagcatacctgaagttctgttatagtccatggccatcatttgtagaaaggctaattacatgaactgtgtacctttgaaaggaaatcaggttgtaatcttccttcagagcaactgcttctattaaggacctgaaacaggataaggtcagttcttgttaattacgagtaagaaaaggttaaaccatacaagctgaatccatgcttcagaaccacagttctctactggagagcccaagaaattcatttgattcatttttgtaaataaacaacttcattttaatttggcttggatgtatttcatcatcctaatggcgagacgatcatccagagaacagaaggattacatatctgagcctacgcttcaaaacacacgcttctgttcattagtgccgtcccatgtaaatttgcttaattcaatttggttatataaacgactttagttgaatttagatgcaatgtgaaaagacgcccaaaatgagttccggagcaaaagaatatctctacttctccatcctaaattcataatccaatgaccgtcccagcaaggcaagaattgggtgaaccacatgaggagggtaaaaaccgaacctttccgccgcgactaaacaagaaaccagtcaagaatcgaagcgaacgcgcacctgggcaagaaccgccgcgaaggacatcccgagaggcagcgcgaggtcctgcgcgccgtcggcggcgcccctcccatcccctccagtcgcaagcagcggtctccggagcctctgccgccgccgccgcaggcgcacccccttctgcagccgggacgcggagccgtacgacgacgccgacgaggacgccccgccggactccggcgagccaccgccgtcgcagcaggccccgtccataataagggagcgtggcggcgaggcagaggcggtagggtttagttgccgcgccgcaatttcttcgcctcgaccggtgcgcgacccgctctccggtgggcttctcataacgggggagagagagagtctaggaaaggcaagtcaaaatgggaacgcgacgcggaacggcttcggggtcgcgtcgcgtcacggtgcggtttacgttagccgttaagcaaactcggaaattctgagcaaactttgtgccgttttgtgcgtgtatattaggcttttggcctggtttccattaaggaaaaatgttgtaaggaaggaaagcagtgttaaattattataggaatattatttaaactactggtgttgtagtatccacgaagtttaccgtgtcatttgaaatttctaagaaggtttcacaaactttttccgaaatatttgcccgtcaaaaaacatgcactgaaagatcaaaaaactttcttcaagttttcgagagaagttggtcagtagctttgggccctgcactgccactcggtctttgcaggccggtgcacatcaagattgggctggatactccgctatcaacgggttccgcacccacaaggcccgttacgctgctgattttgcttgcgcgcgaaccggattcgatggcacgaaatctcgttcaatcctcccttgattaacctgacgattaccttaacatatctgccacttatttataaccacctcatcccataatcccatcctcatccaagagaagatagatatccatcaatcaaataaccatggatgatgcggcgggtagaccaccgcgcccggcggcgaggtgcccacaggctggccggcggccgacctgccgccgatcaccaaccgcgacggcctcattgtatcccgatccagctgaagcggcggcggacgtggctgatgattgctcggtctcccgccgcacatcatggccgacgaggaggccatcgaggatgtcgatcatgaagacgttcgccgggctggtccgcatcatatcgaccggtggctcgacctgacggatgggaagacgacgcacgcggctcgtctgcgaggtggacgtacgtcgtcgccgaaccatgcgaggtgccgcgcgtcctcgcgctccacctcgtgcccaagtggctcgtcaccgtcgtgctgcggagacgcgacgacgacgcctccgatgacggctgtgacggcgagtcggctaaggccttgttcggcacgcatgtttccaatccaggccaggaattgatcaaggccaggtttcagtggatccgggtggattcactggaaccacctgtggattgaatccattccttttttcaatccacctcttcaaaaatctgtgttcggtttgacctggaatggaatgaagccattcaagctgccgtggattgtcgatcgatcagatccagtgattcagaactcaaaacattcagttaatgtcatcactcattagaattcagaatcatgcacatttctaatttctaacagtaatagtatattgcaggagttaattaaccaaaattcccaaatagaaagacagggaacaccctgaatagcatcaggacaattcttcaccatattcagttgctgtcatcattcatcagaattcagaacatcatgcatatttctatctagttaagcatgaacagtaatatatttcaggattaagcacattcttttcaggactatatcactaatcaatctggcttcgccttcctccggtccctctggtagcaatccatcggcatttgggaatatcaattgattatccgctgcagccatagcaaagaaatcttgcggttaagacttagacagtgtgatatagaagcagtacaactcttgcaagtaaaaacagagcaagtaaaaatacaatagagctgttgaacttcacacttattatccattttacaagtttgtttgcatgcattcaaacaaacttgggggatctgcatttgtgttatcatcataaaagggctatcctatgtggacacaacatttgatatcttcagattcgaaaaaaccaaacttgtcggcttatataataagtagatatgtgaagtctaatacaacataatatcaagtaaattcaaaagaaaatttggtaatgaacagagaatttccatttattcacatgtttgagttttttaattagcctaaactacccagagcttagaaagaaaatggtcctattccaggacttagatgtaattgaaaaatatgagcctatttgttgttgtcatttattacagactacataagaggcaatttagctgaaaaaaatgttaagatactgcactgtagttgccagaatgaggcagccaaaaaagaggcaacaaaatcatcttcctactgcagttcaatttatatttcagcatcgatgcgcaaagctttcttctccaaataaagcagaaaaatatgcttgttaatgatgtttgctgataacaggggctggtttgttaatggatcactagcaggattgcagtttccaccaccctcaacaatagttgtcagtaatgccaggccttcatgtctgttgaaaacgcctgaagcttcctgcaaattctggttatgaggtgcaaattgtcatgcatgatgatcctcagagaaagaggatggccccatcggaacaaggacaatctacaatgatatatgcagagaaagggagaagggaccaaagcatctgatggaaaatggctaagatttaatgaatcataaacagaaagatggaaatagaaaaggtttataattagcatagtagtttgttgaggcagccagtgctggctaaaattaagtatccaagctaaaaagcagctaatccatgaggacatgtggttatcaaaatctgaataatgaacagaaatgccatcaagaactgacaaaaactggttatcaaaggatcttttcttatgcaacactgaatttaataacaatcttgacttagcctggcttgggtgagtacaaaaacagagatggagcaccagtccagttacagtgacatgtttttttttcagcataatttcctggttcattcgagaagaagacaaactgaaagggaagctggttgacagatccatggctatgcaacacatcgatccttcagccaagatctagggcaagaaacagaaccaagaacctagggctcttccaccaagaatcccccgcaacactgcaagaacctaaaccacagaccaaatctccaagaacccatcacgattcccccatccccaccccctacgcggatcggaatccccaacaaacaccagcccttggaaagccctcatttgggcggaagaagagcagcagcagcacaagaaccctagcaagcaaaaaccaaggaggcggcggtggcgtgctacagcggcaggggaggaggcggtggccaagaaccctagcaagcaacaaccctagcgccggggagagaaaggaacaaggaagacgacggtgatgcgttactggcgagaaggcggcggagagcgtggacgtcggatgggaagcgggtcgtcgtcgccgtcgcctctcgcgtcgccagccgcatgccgtcgcctcttcgcttctcctctcgcgtcgcctcgcgtccggattggaaccggagggtcagaggtggggaatggatccgggccaggaacagggggaggcaggccaaaccgggcccgtttccaatccgggccggccgaaacgaacgacgcttccgggccagaccagatttggaaacgggccgcttcgttccggccggaactgaggccgttccgggccgttcctggcgctgccgaacgaggcctaagatggagatgctgccgtggttggatcgtctggccgtccaatgcagccacgattttttttatggcggtgagaataaaaccatccgttgttcttggtgattatggaaattaaccggaacaggttctgataactctccgcgaggagagcgccgcggcgtcggtagcgggcggcacggcgagttcccgtggcgatcgacgaaatgggccggaacggtaatgcggcctacgtgcggaaatattggtcggaactggattcccacgtcgcgaatgttgggctgatatcgcgctatggacagaccacaaactaccagcccagtaacgacgatctgggcctgagccagattcccgtgaactgtgccgatatgttgggccggcctcagcaattgtgggctgaccaatttgtgggttccagctccacatgtcctggagctgaaccaaccaaacatttgtagctctagctaaaacaagagcggagctcgcgaagctcggtggagcatttttataaaatgaactagagaggcaaagttaggtttagactactcaacaattacactccagattcaactcctggatccattgtaactggcttttttttcaaaatcaaaaatcagaccaagcgaaaaattaagagacctaaagtgaacttattccacccagatggtgctctggaatgggataccgacgccgcgtcgccttcagttgtccacggtctagctattttttttttcaaaatcgaaaatcagaccaagcgaaaaattaagagacctaaagtgaacttattccacctagatggtggtctggaatgggataccgacgccgcgtcgccttcggttgtccacggtctagctactacaaaatcaaggccaaaatgcagtcttctgcttctttttttagaagggtattttttacccggcctctatatccaaccgaatatatgcatccattgaaatagggaatttagttctgcaaacaataaattcgctccatagaaaatttgaactcagaaccttggggtactactcaggtcactgtagccactaggctatatgcaatcttctgcttaattattattgtcaaaatcaagggtcattttccgcttagataatccgcacgacttcaatgttcgatcgtatcagcatggaatttgtttcaccattcaccaaatatgaaatcagccctaggcctatatatctagggcactattacttcactttatagagccttgatgcttgtcgcttcagccacagcggacagcgtccgtccgtgcgtgcgtgcgtgcacggtctccgtgacgccgaaacaactggccaacaacaacgatctgtgggtgcagtttactgtagtgccaaacttctctctcttcgtgtcctaggatttgtttggatgagcttaagttttgagaagttgtccttggtagttaacttatgagattcttgagaagctgaatttctcggtttctgacttttatttattttattttggaatctgaataaaaagctaaactatttataaaagttttaattcttggagctcgatcatacatcccctccgtcccaaaaaaaaactcaacctaatataatgaatatagacatactagattatgtcacatttcaatcctagattgttttttttcagatttattgtactagattatattagtattatattatagttctatgttaagtttctttggaatagagggagtatgtcacagctgtcacctatcccagagcccgaaatgtttgacatattccctcgtctggtgctttctggtaggctatcacatgatcatctctaccagtcagttcttgccgctcgacctgattggtcacctaagccattaggtccacgacgatctctcaccttgcacacgccatggctactgtggtaacagtgttataaatggagtgcacgcaataggtgaaactaccctatgggtagctgctgctagtagctttgagagcgtgcaacttgtcacgtccagctagagcgagtcactgactcgtgggcccggacaccgtgcgtttattagatggcgaattgtttaattagaggctaatttggcctcgacctgggacggggttgataggctaaacaagggtcaaaccgacccctatcccgactcgtacttggcccaaattaaacctgtgtgcatcgatcggaccgagccggtttaccccagcacgaatcgtgatgtatcgctgatcacttggtgactcggaaaccgagagccctaggtagctactaatccatttgcacaaatttaaatactacctccgtctcaaaataagtgcagccatggatatccgtgcccaacgtttgaccgtccgtcttatttgaaaaatttgcgaaaaatttaaaaaaatttagtcacacataaagtagtatttatgttttatcatctaatagcaataaaaatactaataataaaaaaatttcaaataaaacgaacattcaacctcaaacgttaaacgtgaatagtacaaaactgcacttgggacggggggtataacgtaccgaattgaacccgatccaaatctgcactcaaacccatggcataactaaccacaacgtcgtcataaatggatcacaagggagcaaaaaccacttgtgaataaatttttactaatcccagaaaggtaaactctaatgatctgcaacatggccaatcagatcgtttcaaatatcatggccaatcaggggccgtacacgttcatgcgaaggatcgatgcagcttgcagagtagctagcagtagaacttctggtagatttgcacgtgattggtcgttccgatccattttgctttgggctacgacgactatgagcagagttcaagttgaaccttgttttgtttacatgcaacggttgccgtgctaattaagcagtttattaccaagggagttagttactactggtcttgtactattggagtacaatattttgttgaaggcatgtgggaagagaattaattttattcgggaagtgaatattaaactcttaagaacatatcctcatgttgtctatataccatctaaatatttatgaaaaaaattaaaaagataaattaatatgtgatatattactccgtaaatatacaagctataattcaactctcacaagttacaacaaaaataactaatcaaactaatgtatattcacaattaaatttgtattttttaacttataaaagttgaatctatcattgcacatgtttgtggagtaatctatcacatattaatccatcttattgatcttctaaaaatatttcataactatttaaatgaaattctaacaacgagatgacgtccctcgagatagtttagaattatcttttatctattcgcgatcgaactcactgataatagggagcaaattctcttacgtgtaagatcgaatcacaagaactaagccaaccagagggggggtgaatggttgatataccccaaaacccaaacttttagcgcaaataaaagttaccctcaaattcgatgtaaaccggtctgaccgaggttgatccgccggtctgaccgagctcgtgccaccggtctgaccggtgttgatccgccggtccaaccgcctgaagattgcctgccgcgtgtgaagtcgccgccggtctgaccgccgcctgccaccggtctgaccgccggtatgtcgttggttagaccgccgaaacccgatgaaacacaaatcgaagaactctcaaaatagatgacaactttattacttctctctgtgtttacaaagtgcaccaacatcactccttacaaaaatcttgactaaactcgaaaccctaactaaactagcaactcaatagctctcaaaagcgataccgggaagcctcacgctccccctctatttatacatgatgtaggcagcctaaagccacgaaccaaactcatactaagagtcctaaacaccttaggaaaccctctagtacaagacacaaactttacataaccaactgtaccaaatttggactccttccaaattcgacttcgcatcccatacgcacactatacctccatcgtatgccatatggaatcttcaccaaccacgtgcatcaactctagccttagtatcccgcatgatatctgaccaccacggacatcgtcttaccatcaagccgactcccagtccatcaccgcaaatactcttccgaggcatcgagtcacctacacacgaaataaacaaagaaaccatattccgataccaagctatccccaacttgactcattgttagcaaacaacagtattacatacgtatagtatccatctagaagccataaccatgaaacaatcacggatatccaaagaaacaacccaaaaccgaaaccgacacaacatcggccggtcagaccgcgggccggccggtctgaccgctcgatcaccaccggtctgaccggcatacaccacccggtcggaccggtaagataaaataacagtgaatctgatcatcacctgaaaattgattatctccaaaaccacttcgacgataatctccaaatatcaaaaccaataatcacagatacctattgttcatcacagaataagaatcaaaacacactttgatcttacaatctcccccttgatgaacacattggcaaacctcataaaaaaatgttttggtgtttggaaaaataaaaacaaaagtggtaaaaaacacacttcgtacaaatgtacacatcgtgctcaaaaatccaaaagaaaacttctccccctttttaaaagaaagaaattctcaattatacacactgtgctcaaaaatccaaaagaaagaaattcccccaattgaaccaaaaacatgctcttctcaacaactctcaaaattcaccttgcttctccaaaaatccaccttgcttctcaaaaaatccaaaaattttcacattacttctcccccttttgacaatgatttcatcaagcataggaattatgttcattaatgttcaagagcttagtatacatatagcatatcaagtcatgtattgcaataaaaagaagatgaacccatctataacagaacaagcatgcattaaagtataaccatgaaccaaagattttacaattaagcttgaatcaacaatcaaaattcatgatttcatatgatttataatgcaacatttttacaagcacataggttgaagaataaacactaaacacatatacctattgcatttatcactctttctcaaataacctttagcacaaaacaaccaagagaatttttaactttttctttttcttgagcatttttgctcatatttttctctttttattccgggtacgtccctgtcatcaagactgtttctagggattcggcacccattattttgctcacatcgaatacgtccttgtcgtcaagactgtttccaaggattcggtatttatttttttctcatatttttattctgtttttcacaatgagcaattaaagctatttgaggaataacaagtcaataaagcatatatataaagcatttataaatcaaaccatatgctagcatcaacattgcatatttgcttaattcaagtatagaatttaagtgtcatgcattatctcccttgaaagcaaaatctaaatcacatgaaaagactagaatacatacaagctttgctagagacaaataaaccttcaaagtattgctagcatgcacaagaaaataccatatgtataaaacaaagttctcttttctcaattttttcattgtcatattattgcttgataaaaccatgaggtacaaactccccctcaaaacatgccaaaaggattcacgaataagcactaactccccctcaaaataacctccaattctccccaaacaaaaatcaagaagaaatcaaagattttgaaaaagacatccaattgccaatgatatcaccaagattatcatgaattgacatgtatacacttgtattaacaaaaactactacctcaaacacaagcatatgaaaagctaataattaagaaagtagaacaaaaaatatgtcaatccaaaattaaattgatgttaccttgtgaagcaatcgtcatctcaaaattgaacactcatagggagtatgctgccaaaatacctacgaacgagaagatgtcgaggccttcgtgttggggttagaaataagaaattttggaatccaacactgagttacacgacctgtagaaccagtaggtacaaatgcactgacaaaatcagaatcagacttacctgaaaaattacctttttccttcacaaaagtctgagttaaatttcgtacaaaattgccccgaggtcggtctgaccaccgctgtgcctacggtctgaccgggcctgacagccggtctgaccgccggttcaactgcggtctgaccgctggacggtctgactgactggtcagtgtcggtctaaccgtggtcctcgaattaaaacccgatttttgccaacgtcgttttgcaaaagcaatttctctttccttttttctgtttatgggcaagtttaaaacaaaaaccaaccaaatgtccatcttttccacaaaaagaacaagtgtacttctcacgacaagtttgtgaagtggatggttttgaaattgatggttttgcaacaacagaaggttttgcattcacaacatttgatttcgaagaagatgcattcaaagaagacatgatgccagcagatttatacacagtgttcttaggctcagtttcaatcaaaatttcacctctcccagcaacacccaaaaccgtaggaggatgtctagtatgatgagcataagaatcaaaacctaaaccacgattgtgtgtgctaactttagattgatcaagaatcatgttgaggttctttttaccatcagaaaatctttgcaaagaacttttcaaataagaaacctcctgagtaagaatagcacaatttttgcaagcatccaaaagacctttttgttttctacaagttgagcaagaaaacacctcatcttgtttaacaatttcttccatgtgtttaacacgctctaaagcatctttcaacttcaactcattcaaaacacactttgaacaatcttgagaaatcaaaacaccattgttttgttttgccttatttgcacatgaagcattgaccaaagaacttgcacaaaaagcaactttgtatttttttcaaaacgttctttgtcaaaatcaactcatcaacaacacgagcatgtaaagcaaatccaagagcaaaagaagactccaactttttagatttttcaatctcaaattccatttttttgcaattaacagaattgacatatcgcaaagcattaatttcagaaaataaaacttcacaagattgacaattatcatctttaggaatcaaagattttaatctagcaatttcagcattaagaatctcaatcgtacgatccttctcatcaagcacaatagaacatgtttgaagtttcttagcaaatttgtaagcatcatattctaattgatcataactaagcttttcttcattatcatcatcagattcatcaacatcagaacttgcattacgagcaataaaagctagatcaacaacttgcttacctttgccctcatcttcatcttcagatccatcaaaaatttttatgagttcttgaattaaccactgcatgcaatgtttcttcttctccttctccttcatgttcttcttcttgttcacgtcatcctctttgactctaccatcatcttccttcttgactctcccaagcttagggcaatgcgagcgaagatgatcaagtgcaccacactcaaaacaacgattcggttatcctcttttcctgttcctaacatttttcatagctcgagaaaatttgttaaatagcaaaaccaagtcctcctcctcgaactgttcgagttgatcatcagacatggcattaaataaagtaagaacataagacttcgatgaagaagcaccaacatccaaagaagttgaagacgaaaccaaagcactagaattagaatcacctttacgagaaagaatattcatctcatgagttttcagttttgtgtaaagcgaatccaaagtcaaagtagacatgttcacagactcctgaatagatgtaattttcatctcccaaatagacatgtcaagaccattcaaaaagtgacgagaaatctcaaattgtagataattagcatcataagaagaatcaacagatctaagatcacccaaaattttattaaacctaaaaaagatagtcatccaaagcttctccaggtttcatctcaaatttaatgtactcctttttgaaaagatcacaacgaagttctttaatgttattagtaccttaatgaaaattattcaaagcaacccaaatctcatgagcagtttgaagatgagcaacacaatcataatccgaacgagaaatcccactcaaaaaaatattgcgagctttgcaattcagttcaaaagcagttttttcagcagcagtattaataacttcaggaatcacataaggaagagaaacttttctccaaatatcataattctcagccataatgtaagattgcatcctactacaccaatgagaaaaatccattccatcgaaaacatgaggcttagttgaaaacttattagaagcagccatggcaaaaactttggatcggttaaaatccaaagaagcaaacaaagctctgatactacttgtaggatcgaatcacaagaactaagccaaccagagggggggtgaatggttgatataccccaaaacccaaacttttagcggaaataaaagttaccctcaaattcgatgtagatcggtctgaccgaggttgatccgccggtctgaccgagctcgtgccgctggtctgaccagtgttgatccgccggtccaactgcctgaagattgcctgtcgcgtgtgaagtcgccgccggtctgaccgccggtatgtcgccggttagaccgccgaaacccgatgaaacacaaatcgaagaactctcaaagtagatgataactttattacttctctctatgtttacaaagtgcaccaacaacactccttacaaaaatctcgactaaactcgaaaccctaactaaactagcaactcaattactctcaaaagtgatactgggaagactcacgctccccctctatttattcatgaggtaggcagcctaaagccacgaaccaaactcatactaagagtcctaaacaccttaggaaaccctctagtacaagacacaaactttacataaccaattgtaccaaatttggactccttccaaattcgactccgcatcccatacgcacacaatacctccatcgtatgccatatggaatcttcaccaaccacgtgcatcaactctagccttagtatcccgcatgatatctgaccaccacggacatcgtcttaccatcaagccgactctcagtccatcaccgcaaatactcttccgaggcatcgagtcacctacacacgaaataaacaaagaaaccatattccgataccaagctatccccaacttgactcattgttagcaaacaacagtattacatacgtatattatctatctagaagtcataaccatgaaacaatcatggatatccaaagaaacaacccgaaaccgaaaccgacatagcgtcggccggtcagaccgcgggctggccggtctgaccgctcgatcaccaccggtctgaccggcatacaccacctagtcggaccggtcacataaaataatagtgaatccgatcatcacctgaaaattgattatctccaaaaccacttcgacgataatctccaaatatcaaaaccaataatcacagatgtcaattgttcatcacagaataagaatcaaaacacactttaatcttacattacgttattatacgttcaccgtgaataacatttagacccatcactctcgagttcatatatcagccaccacatcggaggaaagttatgtgagagaatttcaatcggtgataatataggcacgtacgtgtcgcctctcgacgacatgtaagacctgatgactgaaaaaccttagcgcagtactactctgggccccggcgttagtggctacaaagcagtacaccagttggtgtgaactaatttgacagcttaattactttgcagtcgtgttatgttagagtaccgaaacgtgtgcatgactagtgtaggtgacaattacatttgggatcgagttaatggtgacaataacattggcatcgagttaaacacgccgtacattgaaacttactctacggatatattctccttgtctcgaatgaaaaagaaagaaagaaaataattaatgatgaggtcaagaaaatatcacatcgttgatctagctggagaaaaccaacaagctaagactgctagctactgaagaatatcaaccatggtcgctataatggaacgatcaaattagaccactcgacaagatgttgaaagattccatacctttgactatgctagagcattttcaccggtacgttaattaccgcgtgttaattcgacgtacgtcaaaactaaacacctggtagtacgtgttcgaactctcctgttgcatgcacacgtaagtgacacgcataagaatccagaccgatcacacgtaatacacatggaaatcaaatcgcacagagactaatgctgcaattaaaattccatctggaatttaacacgatcagtacgtctgaacatgcctacatctacctgaaacggacccgtggaaaaccggaaaacgccatggccgacacacatctacactactctcaggctagtccaatgagcactccggtcgtcgccggccgtgcaaccgccgaaataaacgacgacgacggtgacgactgatgagacgttacaagctaggcaagaccataaaattaaattaaaaacaagcacacacgcactagaattccaagaaaactacgtcttgttacgactctttgcttgtagcagtacatgtgtcttgttgtgaaatgttgattaattctagcccttgtaagtgttatccatatcgatgcaatgcctgatcccgaagccacgtcttgggatttcgtacggggctcctcctctcacgaggagctgagttttctaaccaaaaaaaactgttacttattgtgcatagtcagatcgatagataggttgtttcaaaaaagaaaacgatataagatagatgttgcatgcatatacattacattagcagtgagattaattaatagtaagaacattaattatccataatatgtaattaacattcataatatatatatgtctgttgcattgctggtggtaatgagaatcttgagatctattccaagtccaacgtccaattaaaggagaacagcttatatattagccagtttttggttccaacaaccagttgacctcaatcatcatgacgatcgaagagctagagaaaaaaattatcaggatcaaaggtgtattataatacagaagagaggatagttggcgtaaaataataactatacattgttactgaaattctgtgtggcccaaacaagttgactcgagattttatacggagacgcaactgctagtccggccttagttttccattatactgtataaatcttcggtcatcggtgagctatagaaggagatcagattaaggcactgaaatggctatcaccttacaggatgcagacgatggcatgccatgagtcaacattgcagaggtccgacttaagacatcgaagcatatatatacactaagtgttgtgaatcacaattaatgcatgcgtttagaaaacaaaatggtaacaccttaggtttttttttctaactaatttttgggttttgctaggtttgcatacaagctagctagcaacctcaatcaagggcactccttaattacataagaattatataaaggtcatgaacgaattatattgtctaacacatatatatcatcaaaaaaaaatttgcatgttgttttactcaattcctaaggtgctgtagacagctatattctccatgaaatgaagtgcttgcgagccacttgatactaaattatagtcacatacacaagtcaacagttcaatttatagcgcgagcgagttctataaaagtactaaacatggcattgaaagttgacattgtgcaactagaatgctagatttatacatatgaaaagaaaatattaatgtatatatagctcacattttaatctgtcattttggtaatggggaaactaaggtgcgtgatgatagcggccctgaagaaattccaagagttgacctgggctccatacaatactaatccccttagcgttagaagcgctctctcccatcatgcacatgaccaagcccccacttgacttcggtatcccttgtcatttggatcacaccaccgtgcacttcacaattcacactactccttcagattaatccatctcgttgatatttcatctcgagtcgtaaaaaccctcatattgtattcatcactgacatgtgtgcccccaaaaaatatcaataggtgtagaaggtcgtgtatatatacgcattcatgtgtgtcaaggcaatatattttgttgaatatgagatgacatgggataataggattaaggaggagtcttccctcctcattgcccttttaatacgtcttagacacccagacattgacttagatgcctcgggagaagtagcattaggatttaagaccgttccccattttagctgtaccaagagagacaaaggtacacaagattaccagaaagaggccaggagcatgtcatccaagaagaagagagctgccatagatctctccctggaggcagagagaagacggccagaagaacgcggcggcggcagcgatcgcgaagccagcgatggcgccgctgctgcagctgaggaagatggtgatgtcaagcaacgagagggccctaaagaggaaaccggcggcgaggaggagaaggtagttgaagtggttgtggaccaaggagaagacggctccaatgaggagatcaaatataggactcaacaagcagagatgatcgaggaggacaagcaaccagctgcagcagcaaacgtcgacgacgatggcggcgacagcgacggagtcggagctagcgcggaagagaagcacatggtaacagaggccaccggcggcgaaggcgacgacggaggcgatagccgtacccccatggcgcaagatgaggtactatacacagtactacaattaaacttaccgacgattataaaaactcctaattatactattagctggtgatgtgatgcaagtagatagaattaatatcgatggagatttctcttgtcctttgctcccatttggagttgacatatatatgtgtgcttcttcagctcagcgagatgcaggaggagatggagaggatgaaggaggagaaccggatgctccggcgagtcgtcgacaagacggtgcgcgactactacgagctgcagatgaagctagccgcctaccagcagcaaccggcagcagcagatgagcctaaggtgatttaatttcttaattagctgagctagcttaaccaagctgatttagctagctattatagctaggctaaatatccaattgagcctacccatgttgaaactaagcttagctctagctcgcgcgctcatctcgtgcatgactttaattattcttccacgtgacacaccataattaccatattactcaattaagtcacgccttgttgtttgcgaactcgtgattgattcgatcgatttccgtgtaggagaccgaggtgttcctctccctcggcgcaacggccgccgcctccgccggctgcggcggcggcttcccggaggcgaagagcaaggagcaggccgcgtggcggcggcgctctgtcggaagcgacgacagcgactgcggcaaggaggatctagggctgtcccttagcctgggagcgtcgtcgtcgtacgacgacgaccagaaggcggtggaagcaaggccgcacgacgtcgacggcgcggcggctgcggccatgatcggcggcgacggcagcaggccggcgccgagggggtacgcgctgctggagagcagcaaggtgcagggtggcgcggcgccggccgccggcgagctcgccgcggccggcggcatcacgagccagagcgtcaacccggccaaccgcaaaactagggtttcagttcgagtccggtgccaaggccccaccgtaagacacaatgcatgcaacatctgtgcgtgcatgcgtgcagtacatgatacgagtactaattactaatattgatcttgtgatgttgtcgcaccggtgcagatgaacgatgggtgccaatggcggaaatacgggcagaaggtcgccaagggcaacccgtgcccgcgagcttactaccggtgcaccgtcgcgccgggctgcccggtgcggaagcaggtgacgatcgaaactgacaagaattcagattgattagcattggttgcatgcatgatcatgtgtgttcgtgcatggattgatcgatctcgtttgattgtgtgcaggtgcagagatgcctcgaggacatgtcgatcctggtgacgacgtacgagggcacgcacaaccacccgctccccgtcggcgccaccgccatggcgtccaccacctccgccgcggccaccttcatgcttctctccagcaccacctcctcctcctccgtctccgacgcctccgccgcgccgtcgtcgtcctacctcagcccgtacctgctcaactccgcctcgccgttgctaatgccgggcgccaccggcggcggcggcggcatgcagcatctcaacctgttcgggaattcgccgtcgtcgtcgtctctgctagctccgcaagcgccaggctccagcaagtacccgtggtctccgaaccaccctccgctcgccggcgccggaggtaataagagaccgttctggagcgccggcggcgacggggacaagccggcgccggcggcattggccgagaacgtcggcgcggtgatgtcggacccgaacaagttctcggcggcgatcgccgcggcgatcaacaacttcatggggaaagacggcgagagtagcagcggcaagagtagtagtaagtggggcgtggttgaatcacttccaccccatgagtagtagtgagaattatattactagttactagctaatcaaatgtgacaagattgattcaatgattgggaaatcagttaggattattgcgtgtaaacaaatcaaactaggggaaatcacacattggaaacatttttttcggggagatttcgttgtaatttttcagtttttttttgtttggaacagatcgaattgttgttaaccgtaaattacagtatctgttcatcgtctttattaattaacaaggttgtacgatcatattcagatcatacaaagtagtatcctatattagtagggccgtgggggttcagttctgtgtgctataacagttttttatttactacatttataagcatttttatggttattttaccatacttaaggagttatcgggagttaccatattttctatattgaaaatattttctagtataaaatttgatgcatatggtggtattagttatcaaaatttttagtgtaaaatgtaggtacctgctctattaagaaccataaaatttctcattttcttatgggcagtcgatttcacacttgcccttggtttattcaagaatgtttgccggcattttaaattttggagaaaaaaaactaaccggtggatatatcagtgcatttaatagtggtttcaatttggtccctatgtctaaattgatcggttgttttgctctctccttttatttatttttatttttttaacacgcaaaacaattgcacatcaatgtattagaataaaaaaatgttacacaacgtaagtggctagacatgtaattaatgaaaaagagttttcattatttggtctattaattatacacatgatctggttgtaactatatatattgtgacaattattttttctgtttgagaaaacaaatgtccacagaggttcgcttaaatagtaagggttacatcatgacaggatcgcatcatttatgaaacactgtatgggctactgtgccagggtcacacctgtagctgatcaagcattatcagttggcttccagaacaacaatactgaattaggcctaataacaaaaccacactttgaaatcttgtggctagtactatatatatatatatatatatatatatatatatatatatatatatatataaatatatagcttgatgactacttcatccgtttcataatgtaagactttctagtattacccacatttatttagatgttaatagatgtagacatatgtatgcgtttaaatttattaacatatatatatatatatatatatatatatatatatatatatatatgtggataatgctaaaaagtcttacattctgaaatgaagggagtattaattaagacagatcatacgaattcagcaagtattgttttgtgctgtactgctagcagtgcaagagttgttccgcgaataactcatttttccttttgatttttcggtttgagaacgtcgtctagcaccattcaaattaaggaagcctgcagtgcactgtgcactctgcatggtctcctgactaattagcaatctggcgccgtcagctcagctttctcttgtaaaacatactccctccgtaaaaaaaaaaagacaaaccctgggttttcgtattcaatgtttaaccgtctatcttatttgaaaaaattatgaaaaaaattaaaaagacaagtcacgcataaagtattaatcatgttttatcatctaacaacaatgaaaataataattataaaaaaatttcatataagacggacggtcaaacgtttgacataaaaatctagtgtttgtctttttttttttaaggcagagggagtacgtagagattggcgcggccggggatgcaatatgcaagtcaaggccgttgcagcgaaccagcttgttggtagcggccatcaggatgcaggccggatcgatgcctgcaaactattgttgcgcatgaagcgactgttgtagcacattagaagccagtatggtggacaggatcttccggcaggcctctgtaaggccccagaggaatttcacagagagaacgctaagccgctaactcttcagttcagtaagatatcttatatatggggtatatagggcaaagttgtctcggtacccaaaaagaaaggggaaatgttatcactaaacaaggaagaacagagatcgcatattacattcgtatagaggaaaacaatcactgtacgctccggacaagcttctccagactctagagtggtgtactacgttccaacttccaaccccttgtttccattgatcattctaacacctctggtcacatggttctgaccatttctggaacatgcctatgctctcttgcagtagtgtccttcgcgtaactaagcctattttccgttaagctcagtcattgcttgtacttacacgagtgttaaatcccctcctggcatgtactttcatcagcactaaagtctgaaatttcttgtagtattagggtgtgtttgagaagaaggggattggggagattgggaagatacgcaaaacgatgtgggccattagcatatgattaattgagtattaactattttaaattgcaaaaatggattaatatgattttttagagcaactttcctatagaaattttttgcaaaaaacgcaccgtttagtagtttgggaagcgtgcgcacgaaaaacgatgagctttctcacccaatgtcactagaacgaacacagccttagtacaaaaccccaaaatccacactgaacttctctgaacttttatcacagggccattagcctgaagcctcgagcaggaggtaggagagagagagaggctggggaccaatacgccagcaaaagccacagtcccacggatcatgtgatcagccaccgcccacgccccaccaccaccaccaaagccaccaaactcttctctgaagaaatttcagtactcagtgttgaagcctgaaccacccatccagaatcgcaggagcagcgagcgatctcggtttgatctcgtgcgagccgcgcttctcggtccatccgaaaaacgccaagcccaatccaattatccaaccctatcccagatcagaatatatcggatatggttgatttaatcccaactcattactgctatttcttcgcttgtttctcatgcgtgtttacaagaatcttccaacctaatccccccgtcttccaccacaatcacgcagtgacagcgaggaaattatagttgcctggtcaagtaaaactctgcttagtgagacattcctacttttccaagttataaaacaaacattctgaattttatccatggggttaatttcagctgttccaattgtaatctcactagctttattaatgaattttagctgttccaattatgaactcactaactttacatagaggttgatgaccaccggcgggaaggaatctgttcccgtttaatacgggttaacacgccgaaatttactcgaccctacgataaaagtacaaacgataagaggaatattcctttttatattttattttctctctctctctctcaacgtgctacagttcaacggtgtacggcaaatcgcaacacgtcccgtagaaggcaccccccgtctccgccggtttcgtcaccccagcttttgcgtggacgcggtccatggactgcaccgcgaccccggcttccgtcccggctcccgcccgcccgaggagggagccggtgcatggaccgggtccacgcaggggtgaacaggcggcgaaactgtaattgcaacgcgaactcgcaccaaaaaacgtggggcccacccgcccaaaatctttgcgtctcctcccctttctaatccactttttattttttgcgccattttttctttttctttttcgttttgttttttttttcgttaatttggcttaactaggggtgtccttgtctttcgccattttctctctcgctcggtttgctgctctcctcctcctcgtcgtcgtctccaactccgtcgcggcctcgcgctcaccgccgccggaatccggctgacctcctccgctcccgcatcgggcgctcgccccccgggtctaggtacttgcccttgcccccctgcccatgcccttcgtcccgattcgaacatgtcagatttggttggttgggtatcttggtggtgggttggttcgccaggcgccgaggcccaagttctttgtcctggaatggtggctagggagctttgtttcggggttctatctctgtgatttgggtgcggatgggaggaattcttcttggtttgggggaatttggggggttccggtgctgatttgagtgttttctggctggttcttggcgctccttcgggagaattttgtggagctctctgatgggagtggtctaggtcgggatctcagactggatggcctaatttgatcttatcaaggtgaattatgccttctcagtgaggatttaggtgactgtggttacaattgctggggtatttgacctaaaaacgaagatgggcgagcaaaaggggcctcctattgtcaaaattttagtcattgaaccagtagcacgagagcggtgttctcggtgtattctttgcgtgtagattggaggattggccgcaatggcgtagcaaaataccctttaatgtatcttttgagcttctgttgatgcttttaagctttttgattgttgtagtagtgattaacaattttgtaggaaatgatctactgcgagaaggtactgtagtaaggaaatttaattggcagtaaagcttcattttctgaactgtccttgtgcccattgataatgccattaacgtagaaaaaatagcatttcggatagcattttagttaaatcgtgagcacttatctagtcttgggccgtggccctttcatttctttgcttaaagttaacgaagaaagatgcttctcgggtaatatttaataatgcactattcagtggataaggtgcactttttagatggagaagaaagtgtttttgtcactgatttgagttgaaaatggtgaattttgaaccaatttgtggcataagaaaacccttttgccaacctccatccatgtgttagcaatcatggtaggaggatcaagattgaagtaaaacttaaagaagccctttgcttcaaatacctttcttgtgctggttacttagcatgttcttaaaggatggaatccttggcccaattgcagtatcaattgattctctctaattaaaaagttatgtgttgttccttgtttctctttaattctggtagatctgggaggggtcctgacatgctccatgtgggccactggttttccctttatctcttatctggctcttaggtgtgacttttttaatgggtattgtagatcacatctaatgtgcttcattgatttgattatttaaaagcctttggttgttgctattcgtttgtttatgttcctacccttctgtggttggatcccataaagtctacctgtgacttctgctgccttggttgcttgttagtcattgttgtggatcttaagtttgctgacttggtttaaggaggaaggctgctgcaagagtaaagctgcaattggttggtaatgttgctcatgagtttttcttgtataattgcaacaaccaaggaggatctttttgtttgttttccattttgacattgtacaatgccagtttgctacttcttgcttcttttttataagtttgcagccttagtttagtaagtttgcttggtttcatatgcttgatttgactcacaaaaatgataactgtgtggatgcctcttttccttgtttgattatgtgattatatcagggtctacattcactgcctctgtggcggggttcatccctatcatcatgttaaatattaaactttcctccttatgccaattcaatggagcagcaaatggtgattccaatgccaacagaaattgctgcctttggaagttggacagttgtgatttgtgttttttgtttcatgattttagttgcgcccttcaactatccatccataaagctgtgttcatttttacgttgccttgtgtgttctgtttgacaaatgatgaaaatgaccagataaggaatcaggaaatgttttgacttggccaaggaagatccatctgtgcagctcctactgacccccacccccaccccccaaaaaaaagtcctcaacacattcttgacaaagttgattaatctttttcccttttgttttgctaaattgtaatataaagaattaaccttgtacatattttctctctttaatgaaattacactactaggcaaagcccttgtagttttcccagtcaaaaaaaaattgtaatctaaagaaggttaatttctgtgtttatcttgtattttaatatccttgcagatccctggcctgtttttgtttataagaaaacaactgtatcaacaattcatgcaaatcacgttatggtttctttctggacaggtttccgaagaaatggcaagaagtgcaagggcaaggaggcatgtggctcgtcagcttagatccgcaccgtatcccatcccttcgtaccgctggaaagcaatgaaagaatcaaaccgaaagaaaactctgccagctgcacagaagatggactgggaagatgccaactgctctgtgtgcatggaatacccgcataatgctgttctcctcctttgttcttcgcatgataaaggttgtcgcccttacatgtgtggaactagccaccgccactcaaattgccttgatcaattcaagaaggcttacaccaagggtgcattgctagaggaacttcctgccaacactgttggcacgaacttggactcgacgccattgattgcaggtgaaaaaaatgagtctgttgatcttgcatgtccactgtgtcgtggcaaggtgaagggatggactatagtagaaccagctcgaagttatctcaatgggaaaaggaggacatgcatgcaggatggttgctcatttgtaggaacctacaaggaactccgcaagcatgtgaagtcagagcaccctcttgcaaagccaagggaagtcgatcccatccttgaacagaagtggagattgctagagattgaaagagagaggcaagatgcactcagtacgataacagcaactatggggagggcgattgttttcggtgattatgtgctagacttggaagatgaagatgatttagatgatgtagaaagtgatgaggatgacaatgccaacggacacgggacagataacactagacgaatgttaatgtttctaatgcgccaagttgctcggcatcatcaaaaccaaaggcttcagaatgcaattggtacaactggcggtgccgaggacaattatgcggtgagcagtggtgcaaatgcaaccacgccttaccattaccccttggaaggcgacgatgaggatgatttggttatggccggaggcggaagcaccggtatggttagaccagagaggcggcgtcggcgccgccgtagaaaccgcgagaggttgttcttaggtgctaattgagacaacaggggctttaccactggaggagtacattgcacaattggttctctggtgcatagcattcatcaatttcaacctcaatttacttgttcatgatcatgtaccaaagtagttgtcttaaccttttagctcattgtttcacttcaatgtatgccatctcacattcattgttgaaaaggaaaataccgcacccatcttgtgcggtttgtgtagcctttatttccagtttttcagaagctctgctaaatattaatccagtggggatcgattttagatctcaccagcttcagatattcagttgtgcttagtgctgactaaacatagatttgaacatttgctaaaccggaggtgttgactgacgatattacaacataagaagcagtaagatcttacaatgacctgagctcatgtttcaaccaaacatagaaactgtagaatacattatcattgagttcgacacttcatcgttgaagtgccctacactttatgacatcaacatacatgctctaaatgatttcccgtaacataacattacaattttgttcataactacattctacagagcatatattaatataatcatttacttgtatatacttgcaagaagaaagatttgtatctcttcacgacggtcgatgagcatttccacagcagatcttctagtaaaccgtcgatcgaaggcatctgccaattcacaccatcttgcctgatctacattcccagatggcgaatgaatatcacaaacatcacaagcacatgcgagctcgtgcaatgcggtgccaagaatgctcacttctgtcaaacgccatacaccatcatgtcatcgattgctcaatgcccagaaccaggaggcgcattggacacccaaaatctcccacttgagcacagggcagttactttttcctaatgatggtaggcacaccgtagcaaacgggagatccaccgatcataagaggaagcctgcaagcacgcctagcttcacttaaatatgaagctactcgcctgttgccacaagtgcaacgcttactacagttattcattcgttcggacttcttccctcgtgtgcctcttcgcctcggcctgccattaccctccacagcaatggtcatggattcaaattctcgtgttagctggcaacacttcgagcaatttttggccgctacaaaattctcttgcaaccatgaaccgagcaatgctttgctgaatcgatcaatatccttatctgacacatcccagagatttgcgataacagctggagaaccagcagataaatatgataaaggggctccttgaggagcataacaccctttgcaacgcaatgttccactactgcaacccataagaagagcagctgcgcaattatctaatttctcaatttcctttccagagacatactgagttcctgcaacatttcaagaccagttagaaaataactgtttagttctaataaatgaaaatggctgttctctgtattagtcaaaggctaccagaacagtgcccagtaagaacaaagatactcatgatcactaggttagttcttattcctaacagtccaatcaataggtaataaatacaattgaaaacttgaaagcatccattggcactgggccccctagaagcagttgttcttgttccaattgacacataacccactctgctatcacatgtggccggtttgtgtagttgactcaagggcaccatctaatgaattagcggttcaagctttagttatttttatataaaagctgggtttgagtattcatctaaagaaatttcacccaggtggccataatagaccaatcaacaatttaggtcatgttatcacccgttgaaaatagcaatccttaatgtatcgctgttgcagcaatcagtaaaaagaaaacaggttcagcaaataacttaactatggtactccctccatcccaaaatataacttctagtgttcaaaattttatcccgaaatgcaaaaacttctccacctactttcttatctcaatcaatcacaaccatctttcatttaatttctctacatattttctcatcttaatcgatgacaaccatccctcatttaatttcacctcttcttaattcccgtgaaaaactctagaagtgcttatattttgaaatggatggagtattaccctactagacttaattctgaggaccgaaggcatcagggtttaacatgaatgggagaaaacgttaatatgtagatccagcaaaatgatgactacaatctttatatctatagggcttaccacttccatgaccaaaataaaggaaaagatcatgattcctcaaggccaacaccagctcttcagctgttggagcatacccagcctttccctgcatacaatcgttgcaacattcacaaatcacaaccgtttgttggtgcactatataggcatccaaattcatgctttaacatgcaacataaatgctccagcaagcctgcaaaagccctaagggttcatgtcctgttatctctatgacatatgttagacgctgtagttgattgatgcaatttattaaatttagttgcaaccaacagtagcaataagcagacaagctgagctagaggtatctagtgctagcctacaggtagacaagattttgcagccatttatatttctaaagtgaaaggagcagtaaatataaccacttttggtatggcaagcacatgtttacaagcacattgagatgccagaatataaccatttctcatctcccaacaagagcatttccacagttggtggaagcaattatttttcacaaatttagcactgagaaatggttgttagaacaaggactgttgttttatcatttctaaattgttgtcaaatcaatgttaccttccattcgtagttcttaaacatctgatcaaattcttcttgtgtactgctcaggtctccactaggattcaacagataaaatgcgttgaaagggtcaatgacaggaaaaggaggagctataacacgggcatctttccaataattattacttctagtcaaagctagaaagacacttccaattgatggcatgcgataaatttcttgattccttagtgcaggcaagttttcccaaggaagcatctgcatttaatcattttaaacaaaagaggttaatgaagatatcataaatgataggaacatacatcacagcctcacagagtcacagggactgctgattgaaattgaaaaaaaaagcagaggcaattatttttttagagtaaatttcagagaatgccatgttttatagttaaagctgcagaaaaccacacgtattatgactcacataaccacagttttttgtctaaaggtttcataaatccccaacttcattcaaatctctattaattttagcatatctgaaaaaatattattcaaattagtgaagagttaaaccaatcaccttaatcaagaagtcaataattaaaaaaaagcatagacactccatattttttaaaaaataagtaaatatatgctctgcatgtataggggtgggattttgtgaaactttaggaccataatatccagggctatggagctatgctagtaatagttcctaaggttttgtacaactccaaccataaagcatggcgttttctgaaatttattctttttttaatcaacaaaggatgcagtaaattcaacaactgtaagtgccaagctgttgcgacagttttaagatatttgtggttatgtttaatattcatattcatattaaatacaaccacagacctggaccaacacaggcttgagacaaatgatatcgaatccacagtatctattcctaccattagaccgaacagtcaaggaaaacatccataacactatctcaaggactcgaagaaatatctacgcacatgtactaacccacacagtaaacatagttcacaatctggccatcttattgctcacctgcacattagtgtccagaacaaaaatgactggatctctatcaactggttcaatcagctcattcactgtactttttattaagcattcgactgtctccagagcttcagactcaatacagcaagaagataaggctctaagtctgtctttcccacaacaccctcctcggccaaaatatcctttatacgatataagttgggaaacacagtcctgcacttcatccactgacatagcaccaccaaggatgaccttgatgagcactggatttacttcaaatttgaattctgattccagaccagcaatcaggtttgtcagagcttcctcaatgtgttggtcagttaaatcataccccaagagaaggcatttccatggccccagccatgattcctccatgtctctgttcaaaaaagaacataacataccagaaccaaaaagttattaaaaatatgatccatctcaacaacagaaaattcaaacatttttttaggaatacatcttgtggaatcaattttcaagttttgccataacataagaaatcttacttcagcatcttatcaaggtggttgttgagcttcattctatgtgaccaccactttacatggtttgcttgtccatcattcagagtgagggttgcactagagagggaaataaagttctcctcaagtatctttctaaaagtaggagccacgtagtctattatagtgtagccccaagggcactgccaattcttatctgtggctctcattagattgtccagttctttggtacaggaatcttcatgttgggtttctgccaagcaacagccatgtgagaaaaaaaaaacacaaaagaaatactaagagtaagctatgcaattttaatatggaatcaacaaacctttagaaatagcatccactggcaaaagcattgtaataggtttgtttgttgaatcaaacctcgaaagcatcatccaagcaggaaaataagaagggagaagaagaatttccccaagaacattcacaaaatcaccttcaagcatgctaatgcacacaattggtacatcaggaagcttatggaagaattcttttatatgtatctcaagatgtcctatgtctgctgatgaaaacctgagagaaatttaaatatgaccatggaggacaaatccggtaaaaatgagctaagtgttaaactcttgaaaatcatacctaaaagttttgtaaattcatgaaaaattactagagataggtgtagatatgaaatacattctcaccaaatctcaagttcaaactcaactttatttgggagtaaaaaaagaacaaatttcgggtgaatagtaacaggacactattcaactgaaatttgttatttttgtttctctcgaatgaagttgagtttggacttgaatttggtgagtgtatttcataggtacacctatctctaataattttttcattaatttacaaagctttttagatatgattttcacgagtttccaacacttagctcgttttcacatgatatttcccctatacaatgacaaataatgatttggctaatttactacataaacattttgaacctgaaaaactttgagagactctcatctgacgcatttgaaaaatcttcaagagcggcctgaaatgcagggtaaaaattaaagataaatagtacatgaaaaggaatgtgttgatttagcagtgaattacgtacaaaccttcgagtcattttttctgagtaatgattttaagccagcaaagtactggcaatcgagataggttccaacagaattctgatgaaagtatgcagcccaatgattcaaagagagagatccactggagtataaaggtaattgagccgtggaatcaatcgttgcaagtaagaatatacatgcaagtagcctgcaaacctgaaccaagagagttggatttcaacacaagaaccatcaacagtaaaacatatacttgaagacggaaggaaactatagcctgaactcagcaggcactcagagatgataaaattaagaatatgcaatgagcatttaaaacattatactgcatggaaacatgactaaaggaaatcacagacctcctgaaaaagtgagggattctctctggacagcacaaaagctttcagcaaccaaggaacaacatcagacatttgtacactgcagaagcggcagcatatgtccctgaagacagatgaaatgaaaacaacttacacaagtttcacgaagcgctacaattgcaatgtggatatgtgactgatactatagcaagacaatgaaataaccttgactgttctgaaaggaagcccttgagcaaaaacaaactcatactatataatatttctgccctctctgaaataagaaaatcaccagtgctctgatccatgattagtccaaataaattatgctcataagttctataacaatcctgaggaagggatctaaagtacaacaatgatatgcactgccaatagatattatgaattttatgagctccatgcaatcctccatgagcacccaaggcttttgctgtaaaatacaacactcagaagtgagaaaaaaaaactatatgaatatattatataggaatttagtaatgaataaaattcaatcagacttcttaaacaaaaggactatatctgtcaccatcacatgattcaatgcatttcacagtagcaaaagatcatttgatgttcacccgtaacaatctcttcgaatgtataaataaacttaactttatatgaatatcatttggagctaaaagaggatttcccatctcatatgtgtaaaccaacagcatttcacagaaataactgcactcctgctgttcaacagagaactgctcaaaagccaggtatacaaaattgaaaaactggactggtccatgggtcttccataataaaggtatcctcttgaatgttatagcatgttactaaaaaataatagtaaataaatgattaaacatgaaatatatcgaaaataaactagcaaaaacctgaaaacatacacgtaatttatgcgcaaattgtgaagcccttagttgcgcacatgttattacgtcaagtgtgcaatttatttgtttaacacacataataaggagcataaatagagaaaagtacctatttttaacaggatagacacatggttgtgatgccaaacacaatcccatctgaattgcaaaatattctggatggacccagagttgagtgtattcacaaaaaggcaattccaacatccaaatatactgcatgtgtaatctatgctctggtcaacgccatcaaggatacagtttgcttttccacggaccaaagtatctgtggacagattatcgctgcaagataggccattcttacagtgtagctcagttgaagccttttcacctttcatatgagcagttcgcttactagagcgcgtcctagtttttacatgagcttccacattctgttctttagctaaacgtgatgaatttctggttgtccttttaactttaacatccaatggtggacaacattcagaatccttatgtttcagaaattttaatgccgtaaactcattcgagtgatcaccggaagcctgactaaaatttgcacatacagtacatgaaggtaacactccatcatttgcagctaatggttctttcccatatttgctgcagataatgcaagtagttttaagcttatcatatgagtcaacaggagattccaatttggtgccgttcagtttatccagggcagactgatacatgcctagagcattagacaaattgcctgctgactgtttctgaaagtctttctcatatagactccaaaatagatctccagcttgcacatcaagtgatatatccagagttaacttgcagagcttgcacgaaatgaatgtagcattttgtgcaagaagatccctggcatatttaagctcgccctctgcggtgtcccattgctgtctcttgcggtatatttgacctaaaaaatcaggcaacatgaggcagaaggacaaatgacgcaaaaaccaccaaaagcaatatgtacaactgttgtatacttcctccgtttcatattataagactttctagcattgcccacattcatatataatgaatctagacatatatatgtgtcaagattcattattcattaacatttatatgaatgtgggcaatgttagaaagtcttataacctgaaacggaggtagtactatctttggagaagtcccaagaggtccttttcataacttatgaagtgccaaaactaaattacaagtaatagtgcctctttgatcttcgtaacactgatgtaaaagtatatatatacgcacagacctaaaattgataaggaagtatataaacacacatacctaaagctgatgcgaaaaggacaccaaaaaccggcaatccttgaaattgtgatatatcctttcctgttcgtaacaaaacttctgcttcggcaccattaccaatcaattcatgcagcaaagcaacctgaatagttaatgcattacagtgtgagcatcatgcacaaagtttctttttattttaggaagcatcattcccgaagttaagaatgctggccaaatgccaacaatttgtgtgttgcactgtaaaaattatgtctacagccatttgcataccacagtaggcacccatcagcaggttggatgtcacattgacatgacagataggcccacatttatttgactacagtggtgtaccagttccattttttcaatcattaaagagtattgcaatggcctttacgccatgtcattattgtacctgcaaaatgctatcaagatagcactggagtacagtccaaggagtaaggaaagaatctcttgttccagttgatctggtagaatctggccaaatttcagttattgttgatccccatgcttcaagtgaaacagagttttgccctccagaacattgagcttccccacttgtaaacttgccaaaattgaatttgaatttctttcttaggagcttcttgcgtaaatgcaaggcctcttttccgtatgaaaaggcctacaaaaacagaactactaaatgtttatatcacaagaaatctaaaatatcaaccaagacaacaatttagcaatgattcctacaaataaagatcttgcaccaagacatgatatttcaaactggagcaccggtgcaactacctggaaaagttctcctcttgatagaagtctttctgataaatcaaagtacagatagccagctagaaaggttgattgatcatttacagtagcctgtagattcacagtacacaatggttaatagaaaactaaaacagccataattacaatgcaattgtgctgcaaataacaaaacttacatcagaaaccaaagatgatgcgacactatcaacctcatgaacactaccaccgaaaccaaattcccttcgaaaggaaggttcacatgtcgtagaaataaaggaatcaataggccacaatctctggagaaacatacaaagagaaggatggtctcctttaaaacagtttctccaaaattctgtactatggcaatcaacatcaagatgatgctctgcaattgaaataaattgttggtccattgggagatgacaacacgcatgatggaggcgcccattggtaaatagcatggaaaataacttttcagggggtaagttttcttgcttccatataattatcataagcttgcacagatcaaattgaagctcaaagcagccctgatatgtcacagtaaaagaacataactatgttgctaaaaggatagcaattgcatctcatccaaactaggtcgaaaaatctataatgaccttgcttaccttcattgccaacaaatcaaccaaagaacaaagaagtggtacaagattttctgatggctgctgagatatcataccaggagaatagtaaccaaaagttttgatctttgaccacaggccaaatacattctgagcgctatcaaagattacctattcagatgacaacgatgtaacaagcatgatcagaaaaagcaaaaggcagaagtatttattttgtttatatacttgctaaaacatctaggatctgttgtaattacctccgcaccaagattggcttcctgcgcacaatgtgcatgcaggcagtatgcaatagctaattgatggattgcaggtgcattgccttgagatgaatccagtgggatgtctcgctggtttgagaagaaaaaacaaatgtcagatctcccttttatgtctaaataaaataagtggacagtagacccaaactcaccagtaaagatatggcttcagataaagactcaaggcagctgcttatactttgcactccacatgtacgaagcacacgtgcctttctaacaaggaccctcgatctctccaaataatactcctttgaacagtatattttattcaacagaatgtttgtgatcctcttttgcatttctacacaaaacatagtgcctcgagattcaactaatgcataagccaataattcctgtgaaaatcaatgcacgtgcaaaaaccatttagcttcaaatacagaacatgacagattctcagatacagcattatttattgttaaccaataaaatataacatggtacctgctctaaaattaagcctaccaactttgtaggcaaaggaggtgtacaacccataagagagtggtacagaaggggagcactatcaacactttcatcatccttagcatctttgtgtgttatctgtagtgtgaataaccaattaaatgaaatcaatagtggtcttggtagcaacataattcttttcagatcagtaccttaacccacaacttgatgaggactaatgaactgttcaaaaattcggatgtgctatcattagccagcaattcagacaagctcttcacaataatatcaggtattatttttactccacatctatggagaatgtcaaccatcttggtaatcttagcaaacgcatccatactgatgtccttcaatgtatctttcggtatatcctcaataattctctgttcgtcctggcttgcagatagtctatggtaagaaagcctggcatacacccatactgtttgacaacatagctctaaagcctttggtgcctaaaatagagaaaatggttttgaatttgtggttaaaactcaaaagcatgttcaagtaaatggatcaacatctcagaatggtacctcatccaaatgtccaatattgtaaagcgtcacaccgatgttaccaagtgaggacatgagaaatttgatctcatcaagttttatccatgtacttgaaatggcacatttgatgaaggacacgctcttctggactatgaaagcaagatacattaataggtgataaggatgcaattctaattagtaaacagcaggctatgtaaaggcaatactccactaatgtcctttggataggagaacaacaaacagatttacttgtaagtcaactgtttctatatgtaataaaatgatatcaatattaaaaaccaacaggctgaaacaaggcatactgtagttgcaaaagacatagtgtcagtgataaatggtgtccgttcaaattaatcagattcaatctatgtgtaaatacttcacatggtcccaaccatcacccattgctcaaatcagtcctccaacttaagaaacaagtcatactagcacatgacctttattagttggcccattctcgtccatattctgggtcagcagccaaggttacccaacaagaactatgagaaacgaatgaaataccctctaattatttcactgcatggttttatgcatcatgcacaaacacaacagacgctctgttgggtctatgagcaatggaaattaaaaaaatgttaatggagagcaaatttggtcatttcatgtactctaggttggctggagatcctaggtgctgactcagcatagagatgtgtgatgccacatacacacaaggactaaaagagctaattaatgaaattcgaggattgatttgactagttgaaggaccaacgtgaaccacaaacagtaattaagtgaccaaacgaacaattaactccaagatagatacaggaaaagcgaatggggtacctggataccttcattggtaataaaagaaactttcattgctgaaactagggctctcagcaaggttccatgttgttcatgctgtttatccttgtctccttcaggcatttctgtacagctgtcacaagaaaattcaacacgcagaatcagggatcccttttgtttcatctatatcaacataactattttgcaaatttgctcatataaacataggtgggaaccctattgactaagaacatatcaataattgaaaataacttgcaacatagtgtagagctgacaaatgctgcctgtgtatttctgatgaacctacctataagctgcaatgctggaattgataaactgatgcagtgctgttaacacataggtcatgtttatagaataattgggtgttattccttcagagaagttcttccaaactgcattcacgtactgtgataatatcttgcaaagaaactctagcgaatccaggtatgccacaaaagatatatggtcatcagagtgagacaaactgttcttcttattagaatgcccaggctgcattgatgaactagaagctttacccatagtatcaagtggaatggatctaccattggcaaaacaaaaaagatgtgccagtgtggcaagggcactctttaaagtttgtagatgcttttcatcattaagaaaatctgtggatttatgaggccgctctctattttcaatttgctgagcactacagtataatccaatggcataaagaataagtactgaggcagttgcaggggttgaggaaacctacacacagcaagtaattgaattaatcaaaagcactgcttgcattgggatggtatgcattcacattaaatgatgctaacgaaatagtacagcatgtacctcagagaaataaccaccttgttcataaattagctcagcagcaccaacagataaatcccaatttgaagaaacaaagcttcgagaaaaatatgctacaaattctacaagcccatttacagcccttggtaagtcagcctgaaaaaggttacatcacttacatgacaacattacacaggtaaagatgccttggcagaaaaacaggttgttggctatttatggaatgaaagaatagacagatgaaggtgtcattgcacattacaaataaacaaatcaggccagagtgcgccacaaatctgctctccatgacctagttgtttctagtcattatcacttagcccatcagatggcacatgactacattactcaaaagagggggaaaatgatacagtgaaacagcaccgatcagtcctcgatgatatttaacataaaggaataacaagcactggaaatggtcctatataaggggcattcatggttaccagtttaagcaaattaaaatgtaagagaaactacaaactagaaagaggtttccagctgcataaaaacaaaggaagcatgaaaatacctttagacatgcagcagacccaacaacggtctttaagacatcaagcaaaagctgagtgcccccaccccaactcacatctacagatgaacaaatcttgcgagcaacctgatccataaaaatatagtaacatcattgactagccacgttttttagcaaattcgagagggtaatcaattgtgtaatgatacatactgccggcaagcgttcaatagtttgcgccttcatacactcccccaaggttgcacgacagaattcacacacaaggttggtattgaacactgaatattcagcaaccaagagaatggcacagcgacttaatgcattcacaagcagtgtcagatacttcctgctgacatcctcagccagaatcctgcgcacacagaagtacactttaaaccactcatttcctattttattaatcaaactgaatgcaaagcttagctgagcacacaatctcaccgaagccatggctggagttggtcaacaaggctgacaacccgttcgtatggggcagcttccttcaccttgcacttgctggcacaattagcaaagcacacggtgagctcaatcgcgaggatggtgacttcagggtccgcaccagcctcccctgagatgccaggatcaggaaggagggaagcaaaactcgcagtcgcagcacggcgagactttgaggccgtcggcactgacagcacagaccgaagcgaatccagagtggcagcagcgtccgcctcggcgcgtgcgtagtgtccgcgcgactcgaggcagcacacgaatcggccgcgctggagcagcacggagtagggcttcccggcgaggcacgccgatatgaccgcgaggcagtcaaggaggagggcgtaaacgtcgagcagctcgtcggtgcacccggcgtcgcctgagctagggttggggcggagtagcagcgggagtacctggagcgcgcggcacaggaaggggaggaaccgcttagcgagcgggcggaccgtggccgcgtcgggtggcggcggcggcggctgctgcttgcgctgcttcgccgtcctcttcgccggcggtttggcgctagggtttagcgtgggtaggtagggggagaagggctcgaggtaggcggcgaagcgggaggtcaggccggattgggaggacggggaggagagcgcggcgaggaggtcggcggcggcggcctccattgccgtggtgcggattgcgcttgcggcgccgcgtgtggggaaatttttgtgcgcgtatttggggatttcggggacggggatgggcgggaaaggaggaggatttcggagctctgcgcgctggacagaggagataggacggtggggaccggcgaggaggaggcgtacgctggaagatttgattaatgggctggtaaattatcttgtgggctgccagtgggcctattctgatgacctctatatgggcctcacttcaattcaacaatttggttagtgatgcaagaagaaaacattagccatttccaaacatttgaaaaatatcaggcagaggagtgagttttgccgacagtcaacacaatgtaataacagattgttacagtcgtagtaatatctcggttttatttgctctagtatgaccaatgaaatatacatcttgattctcaaatgaaccatgtgcacaaccatccatcaatctacactctacactttttccatggccatcgaatgcgaccgccgcgcgctactccgatgtaccggaactcgagagagctccaaactttgaattaaaatttatgcaactatgctacgtatatgtacagtttttgcagtgtcgtacactacacacgtcacgtttcagaagacgaggcaggacttgtcgaggtcatagcccatcttctccaggcccggccgcaccgtgcactcgaccatcgccggcggcccgcacacgagcgcgagcgtctcgccgtcgcccggcggcaggtgctccctgagcgtccgctcgtccaccctccccacgccgtactcccacccgtcctccggccgcgccaccttgctcaccacgtaccacaccttgagccgcgccgggtgcgccgccgcccaccggtcgatctcctcccggaggagcatgtcgtcctccgtccggttcgcgtacaccacgtgcatctccgttccgtcgtcgggctggtcccagagcacggcctggatcacctggtacaccggcgtgatccccgtcccgccggccaccatggcgagccgccgcgcgaaccggcgctcgccgttcaccgtgaaggcgccgcggccggcgtactcgatgtgcccgatcgggcccttgatgtcgatggtggcgccgagcggcaggtagtccaggtactgcgacatgagcccgccgtcggggaacttggggtcctcgcccttgaagtatatcttgatcaggagctcgatgtagccgacctcgtcgacggagctcgtcggcgtgtacgcgcgcatgcagagcttgccgccgatcgacgcgcacacgtacacgtgcttgccgaccggtagcccgagcttctggtccggcgacggcagcgcgaaccggaacaggcgcacgttgtaggacaggctcttcttgtccatgagccggcatttcaccttctcccgcgggttggacagcgcgacggtcgacaccggcacggcgggcgccgccgctgccgtagggctctcaacgatggacgtgaggtcagcactgctgctctgcggcgagtagtcgctgccggtgacgatgagctcgccgatgcggtacatctcgaggaggccacgggccttgtcggagtggatggcgtcgaattcctcggtgcagtcggtgccggcgttgatcatgatgctgtcggcgccgccggggtggtccttgaggaaccccgtgcagtcgtagacatggccgtgcacgatgatccaggcggactccggcgtcgtgtggcggcgcacctcggacatggtgtactgcgtggtggccgtgttgaggaacggcgtggacgtgctgcgcttcagcgtgctcaccgcgctctccgacgtctcgaggtgcttctgcctcgccatccacccgccggcctggttgcccggctgcgtcgggtgctcgaacaccagcccgatctcccccttgtgcggcctgcacgtcttcgtcttcaccctgaaccagcagttgttcatcatgccctgcacacacgcacacgaaccaaaacgtaagcacatcgtcgtcgttgaaacggatggcgttgccgttgctggtgcttagtgcttaccatgagattccaaatgagcttctccggctgggtgttgagggactcgtcccaggcgcggacggcgatctccttggcggcgagcagctcgagcacctcgacatcgacggaccagaagcaccagcaccagtactttccgtacttggtcggcctctccgggtggtcaaggttgcacacctgccacgtctcgccgccgtccagggtcacctctacccttgtaactttccggccaccgcctggcaacagaaaatcatcaccgttaatcacccattcaccatcagtacaaagatactgatattataacggcccagtaaaagcataaagtgatcatggtgggcttttagaacgagcaggccgaagcccaaaaacaaacaacatgatagatgagatgggcttggggcttaccggagtaggcgtatcccttcatcgtatacggccgctgcgtcgtcagcgcattgatggggagcacctcatcgtgtcccggcgtggtgatcaccgagtttatgttcagctcgtttatcatgtactccggcttgtaccaccaagctgcacataatccaaaaaaaaaacacacaagttaagatcacaaagatgcaacaatgtgtgtctcgtgcagtgcgttcgaggaagatatggttggttaattaccttcggcattggcgagctcggcgtcgacgtgagacgggaggacgcggttgtcgcggtaatggtagtagctctccgactcgctggacgcgacgatgatgcgcttgagccatttcaccatgcggccgccgatgaagcccgggacgatgacccggacggggaagccgtggtcgggcgtgagcggctcgccgttctgcatgtaggcgaggatgacgtcgtgggcggggtccatggccacctcgcggcgcaggctggtgccgtacttgcacccgccgccgcctgggaggtcctcggcgccctcgaagcacacgttggccgcgccggcggaggcgcccatgacaccgcaccaccgcagcacgtcgcgcagccgcacgccgcgccacacggaggtggagatggcgccggggccccagttgaagcccacggtctggcgcaccatgttctgctccttgcgccggttgcccgcgcacaccagcgtgacggggagctccacggcctcgaacccggtcacgagctgctccatgttgagcctcgcggggcgcttgacgagcccggtcacctccacggcccacgtcgaccagtccgccttgggcacggcgccgtggttgcgcacgtagtggagcggcgccggcgtgatgaagccgtgcgacatgaggcgcggcagcggcggctcggagttgaacgggtgcttgccggtgagccggacgagcgccgggtggcgacgcacccacgcgtcggaggtggcctcgtcgcgggggtccttgacggccggctccgccacctccagccgcgggtggtacagcgacctccagtccggtggtatgctgtcctcgtcgtcggagtcggtctcggagcccgaacggcgcttgccgccgccggacgggaacaagtcgaggttgctcgacggagcattgctcgcccacgggtgcggagccagcttgtactccaccgaggccgccattgttgccgatggaaggacacaatgttacaattttgcggacactgtaagctgtaggttgtagctgtggttactgagctagaagaagagatcactcgcgagctagaagctcaggatggcatctgttcttggaagcagtggaggtggtggtctggggtttatatagggacgaggaacgcgaggtcgtagtagttgcctctgctctgatgcatgcacggacccaagcaggccacgagctggcgtcaccacacgcgcaggcgcgcgatgggatttctagggggattcggccggattttttttcttcattttccagattaataccggcgacgtgacgtccatccctgtagcagcctcccatctaatacgtcctttcaattcctcttgtactagatagaaaatgacctatttcttttggagtttcagactgttgggagtgaattttgatcactctagggatggtcgatctctcgttatctgtatgttacttaaaaaactagcatggttgccccatgcagattgtgcggctagcatcattatattttctttcatataatagcatatatgttttctcattatattatttaaatatattaaaatgacaacataattttaaattttgcaataactttataaaaccactaatgtgtaatattcatattgtattttatatacgtgttagttattaattatttttaatatcaaattttagttatttgtaaattatatatattcctatatggactctacactcgtcttttaatatttctttttttaattctgaattttcagtgctcttctttcaatattatttatttttatttctgaatttttattatttataattgtatttctatgtggactttaaacttatctttcaatattatttaatttttaatttcgaattttagttacttctaaattgtattcctatattgactttaaactcttcttcctatgtttttcttaaattcgaattttagttatttgtaaattgtatttttatacggactctaaactctacttttaattttattatgtttattccaaattttagttagttttaaattcatatatgaactctatactctacttctaatattccttattttttaattcataatttctatttttttcttaattgtatttctatatggactctatactctacttctaatattccttatttttaattccaactttctattacttcctaattgtatttctatatggactctatactctacttctaatattccttatttaaattatatatattcctgtatagactctagactcgtcttttaatatttctttttttaattccgaattttctataaattgtatttctatatagacgctatgctcttcttccaatattatttatttttatttctgaatttttattatttctaattatatttctatgtggactctaaacttatcttttaatattctttaattttcaatttcgaatttcagttacttctaaattgtattcctatattgactttaagctcttctgctcatatttttcttaatttcgaattttagttatttgtaaattgtatttttatacggactctaaactctacttttaattttattatgtttattccaaattttagttagttttaaattcctatatggactctatactctacttctaatattccttattttttaattcataatttctatttttttcttaattgtatttctatatggactctatactctacttctaatattccttatttttaattccaaatttctattattttctaatcgtatttctatacggactctatactctacttctaatattccttatttttaattccgaatttcagttatttcctaatcgtatttctatatggactttatactctacttctaatattccttatttttaattctgaatttcagttatttcctaactgtatttctatatggactctagtctcctcttctaatattccttattttttaattctgaatttcaactatttctaaattgtatttatatatggtctctagtctcctcttctaatatttcttattttttaattccgaatttcagctatttctaaattctatttctacatgaactctgctttttctttttctccgattaatgtgagaatttataggccatgagagcgaacgtggaggctcctttttctattcctttaataatataatagattataaaaaataaaaaaaataaaaagatgtattaacatatgatatatcgctccataaacatacaagtttaaattcaacttatacatctcgaaaaaaaacagacttgatcatgaatatgatgtactttaatttgtttttttcgttgcaggatatagaagttgaatttgaacttgcgtggagtgatatgtcacatgttaatacatcttctcaaaatttttcaatttttttataactatttaagtgacatgcaaattatgagaggagatcaaaatagttttctcaaactgttgcactattttcacatctgcattgttaactctggtgagaatgagcagctcggactgttcaacctctcgtaaatcagacacgtgcatacgtgcctggtaaatgccgtggccgtgttatgctaaacacaggctgatggattagttgatcgaggttcaaaaaagaagtttttttcctgacctcctaataaccccagctttaggtgcaagaaaaggagacggcatttggtggctgccggatccagccacccccgaatgcagcttgcctgagaaatgacctcgcccaggtgaatcctggggagctcatggacacggacaccgggcatgcacacacgcacgagccccactcggagatcctgcctgtacactctcgtcgcttctttcctgcttcctttacgcttctctgaatgatcaacgccaatatactaatcaggggcacggacccgcgttccatggtggatggatacgtgcatcggcaaattcgaccagccgacctccattagatcggctgtgatgcagcattggagcgatcataatttagtagctttctttgttgattccccccgtgttccaggacatgcgtcaggggcaaatatttttagcaggtgaaagcctgcaagatcatgcatgagcttgcagcaaacgtcctatgggagttgttcagaactggttgattaacagcggcttggttagtttgagaagccgagtattgtagttatggaaatggcctctaggatctacagagcaggcaccctgtggttttaattactgtaaaggcaagttctacttgcatcattttctcacataattaagtcaaaagtcagagcacaaagtcataagcacacagcaaattcccagctctctcgagtcgacacactaaaataaaccaaagccttgatgcatgaccagcaccccgattccctgtaaattaatataaaccagacagaacaatactaatccaagcatgatgcagagagtatcttatcacaggacataacatagaaagatactttcccattcaaaaggaaatgaaaaaccaaatgattgacttaacccaaagtataagcagcaacagcaggtcgggtggtaattaacaatggcttggcgcatggcattttccaatggccaagtaaccggtgggaagctcggaggatacttcatcacatcacttgctggctggtttctttcagcagcagctgagctgcctactgtagctgcatcttctcaatatcccaaagccggccggctccaaagcaggagttgcctcccgccatcgccaagggccaactggaccaagccctggtccagaggcaggcaggagagtagtagtagtagtagctagtagtagcagcggtggcttgttagctagcttctggagtccagccttccccagttggcgactctgccgctgcgtgccattttgatttcttgagagatctctctttttcatggatttggtgttttgcgagatgcatggaggcaacaacctcctgttactgacgttaaagtgttcgactcgccatcagaaacgtggtctgccagtatggtttgtcgacattgtgactttgtgaggctgacacttcattcacttggctttaggtctagtagtatcctaatgtaaggtggttaaatatctatcatttcctgtatagaattttttgtttgcacattacaaaacagtcattgcttcgcttattctgattataagccacaacagcttattagcaatcaaaaaaatatataaataaaaattatatatatgtgttcttaattagcaatttaaaagcaaatggtgaaaaataagctacaatgaaaagacccccaaaatcaactttaaatttaagtttttaaatccaaaattttgctgcagcttacgagctgagggtaaacaatgggagttttaagagagtaagtgttttctaattggtgcagccctgagaccctatttgagagaactattagaccgtagcccctgtggagaagagtgttgtcacgccccgaactaatcccgaccggaactagcccgtgacgctctaaattaacctgttaatcgatatcagtcccaggaaacagtgctggtatcacagggagacagaatatcacagcaacagaggtctttttattatagagtagaggtacagtcatgttgggctgcggacagatcccgagctcacaactgcaatacaaaagggaaacggaagccaggacttggaccaaacaacacaggcgcgacttgggaactaggccgaaaccctaaaactcatcgtagccggcttgctcctggaagaactcctcatcggcaggttccgcttcatcttcttcagcaactgggggggattatttatatagagcaagggtgagtacgggagtactcagcaagccatgggaaataagtgtttaatgcaggcttcaaggaaaggctgttgtttttgcaattgatttttatttgaactcttttctgaaaacaactaagtgagtgcttctcaaacgacacggatgggacagtgcgtctcgtccggtcggagtatgtgcaatgtatcagtctttagaattgaaacaaggttggcacccggccaacagcttttcaaacggccacccgggccaaccactttcaaacggccacccgggcctagctgatcccatcagctgcagattttttttttaaacatcgaacccctttccacaacagtaatttcgcaagcagtagtcaaacaaaactacgctaggaatcacctcacatccgcccatgaccgtgggcacggctgttcgaacagtttgttaatctctgcagagggggtacactttacccacacgacattactaacccggatcacccagcccgtggggatcagccacgtcgggagacctccaagctttcatgacaaggcatttccaaagccgacacaggtttaccatatgccgacgagaggggtcccagaccaacaacaggttaggtcccagaccatactgtgacaggaagcccaggggtcctccccgacaccaccccggcgaatccacatgtctctcggcatcaagactcccctgataagctagttactcagccaggggtgtcccattccacccatgtggtcgtacttgtgttatgtttggatgaaattccaaggaaacggtccttaagtgcaagagcggaaaaccgtacacccggtacgttccccggtccgcggttttggaaattcatttagttcacaagcaccgacccaggtgtcgggttttccaagtcttttgtaaaacccaagttttacccaagttgttattcagattttaagtttgaaggcgtccgtcgatactcgcacagggtgcacgaatatcgagacgcaactagatggatacaaggagacatgatataacaattaacaaaggaaggatcaaatgcaacaaattaggtaggtccgccaatctgccttgcagacgggacaacagattaagtgcgatcctatcaatgcataatattttacaagcaacataattaaatttcaaatataggctcaagatgttcaaaggtggcttgccttgctcgagatctggagcttgatcctcgaaatcctcgcactgcgggtcttcgggctccgaaactatacgcaaaacgggacaactcaacaaacggcgaaaaataaagccctattaatgacctctaagtgtgccattagttagatctcgagatttgaggaattttggaagttgaacggagtcaaacggatttacggttgggaagatattgaatttctaagattattggatttttggtctaaaggaaaaaggatttaattaaatcctttttggaaaagaaaagaaaagaaaagagggagggaaattagactttcctcgggcggctagggcgcggcccgagagaaatggagcggttcggccgagctaaatgggccggccggcccaaggcggcccaaggcacgcgcgcgcgggaggggaggagagagagagccggtggaccgggctcaccacgcgtggtcccgagtgggacccgcttgtcggtgacacggttcaccgtgcggagcgagcacgcggcacacgcgcgcgggcgggggagggacgcggtgcacgcgcgcggttcgcggtggatgcggatgcggcgggcccacgcgcagcctcacggctcgcggtggaacgcttggccgagctggcgccgacgtggcgcctacgtggctgccacgcgggccggcgggaggtagacgacgacgccggccggaatggacggcggacgacagcggcgagcggcggagcgaaccacggcgatacaggcgaaagcgagcacaccgggtggttgcacaggacgaggggagacgagccaacggctcggattcgccggagggagcttgacggcggcgaattgcggcggcggcaaccggcggcgggagaaggggaaaacggcgacgaggtcacgaggggccgattcccggtggcgagagcatctacgcggctacgggaatccaatgctagcgttggattaggaggaaacgcatcgagggaggccggcgacgagaggcgcttccgagctcgggcggcgacggcggcgggcacatggcgagcggcggcaacggtcggggcggcgccggctagctatggggaggctactcgtgctactacccgagtctaagggaaggagatggaacgaggaggaagaacggagggaggctctaccgagatgaggtggggcgctgtgacgagaggccgacggcgcaggagtgatctatccggcctcgggcaggggaagaggaaggagacgagcgcccggagtccccttccgcgtcctcgctcgtgccggctcctccgacgcgcgcgacgacgaacggcgacggcgaaacagaggggtggcaataatggagtggaggcgatgggaggagaagagagggagggcgcccggggctttaagggcggcaatgtcggtttggaaaccgactttgggcggtcaaggcgcgagctggcgctcggcgctcgtggccaaatcggcgacaggacggagggaggatgatgccggcgggaggaaaaggggaaaaggagggagagaaaggggcttgcctccttgccgctttggaaaaaggaggaggggagcgggggcgtcgcggcagagggaggaggggctctgcctccgtcccttggcggcttgcacgcggagtggcggggccgaggcgatgacaacggcgatgacggcggggcggtgtggagcggagcggcgacacgggcgacaggcgtgggcaggcgctgacgacggcgacgaccaggcggtcggccaccacggcacgcgcgcgcggcttgcacgggagacgcggcggattgagtgccacggctcgggcacgcgcgctggctgcggggccgagcggcggcgcggctgcaggcggcagggcagcgggaccgggtgacgcggacggcgcagacagcgcggcacgggcggcaaccacgcgggcgcgcgcgcgcgaacgacgcgcggggagcggcagcgagggagcggagaggagggctcggctcggcgcgggcggctcacgcgcacgcgcgtgggcagagcggagggggaggggcgctcggcgcggctcccgcgcacgcacgcgcagcgcacgggcggagcggagggggagggagaggagggagagagagcgagagagaaggggtcgccggggagggagggggagatgggccgagagggattcggcccatcgaccccggggaggcaaaatagacttttgcggaggaaattgatttggaaggatttggattcggaaatgaactcgacgatagatcggggattgagatcttgagatggcacggacactagacgacaaacaaagaaacaatatcgcaattagggtttttaagagataattttcccgcaaggcgccacgacggaacgggcgctacaagtgcatattttctctttgaaaataaaaaagaagtgaacacaaactgagttttaatgtgttatttatccctagctcaatcgtactaagctgctacaccgggaaagtatttttaacactcgcatgcacctcatgtttcctccagggtacttttcagaattcagattaactgtttctgaaacgacaaattgtgatatttcctcttttttgacacaatcatgctgattcttgtggattcagtatcccccacagagaaaaagaacgacccagaagtccttttctaagaaaagagcatactactgtcagtgagggaaatgctcacctctattaattctgtttagttcgaagcagatcattagaacagtttacagagtggtggcctgtctgttcagatattatttttccttctgcattttgaacagtatattcattctgtagaattagaacatctctctgcattttttagtgtaccatctcttgcttgttacggttcaagctgttttcatgctcaacatcgatcgattccagacaaggagatgaccatttcacagactcacagtgcgtgcaccacgcagagcaaacacactaaggacattgatcgcaagataattcaatcaaccactgcactcgatgatattcttgttttgtgcaggatacatcactgcttgtatacatgaatgtctaatacgaactaggttactccacttgaaccagaataagagaaagatccccatcagaataccagctagctccgagaaagcaagagctgcttaagaaaaatgtcttccaataagaatccattcaatgattcaatcaagatcaaagctgcaaccgtatgcatagcatgatagcatctataccggattcatctcataaagaaagaaaactttagtacatgccaaaaacttgcgcaagttgccgatcttttactccgagaaagagctagaatattctgcgctttttcacaattcagaatagaaaatatatgatgaataaggaattaaggatacgatcacatccaaaacgaatcgcgagatggaactgtagtgcagcgaaagcgccgtatcgaattcagtcggctctttggaagagctaatggctacactctaatgcaacccacaaagagaacataaaaagtgataaaagtgcagctttaataatggggattcaaacaacatgatatattttggggacctttttcgtgacatcacctggcttgtttagatctttcttcagtggatctttcatgtgttgatatatccttgtgtcaaagtaagaaaatgagatgcacgaataaggtcagagcacaagtgcaattctgggtagttaaatttgggaattgtaaaccagccaacccatggctggaaatggaacacgaccggccaaatcgagtagatgacaatctactcttgtccagagatattcttgtgctgccccccttgttcggcggattcaccgctgattcctgtggcagggcgccgtgaaagccacagcgcagcacatgctcttcagtccctctccacctagacactagagacactagactacgacgttaccgtcgcttgagtcggccgaatgcgcctaaatctgctagagtataacatgaagctgaacagctatgggtagattttgacgttggtaactttggtatccactcagttcttcttcgagcaggatcaaagagagccgtgaacctgaacggcatggggctagccattagccaatgttggaaggagaggcgccggcgggggcacgtgcagcggcgcggtgtcgctgaaaccagcggcccacggcgacgcagcgcaggcggcgcggggcggtggtctggctggacgctggtgggtgggtggggtggggtggtggtggcttggcttgcagctccgttggttcgggcgcgcaagcgcaaaccccttgcgcgttcgaaaggccacccgcctcttgcagttttgctccttttttctctcccgcgactcggcagccgatacaaaagctgcgatgcggcagccggcctagccaagccgcggcgtctgtgggtgcttcgcagagagcgattcagatgatcagatctgtgggtggaagcagagagcgagaactaggctactccctccatcccataatatattaacattttacactgtttaaccactcgtcttattaaaaaaaatttgtacaaatataaaaaacaaaaagttatgcttaaagtattttagataataaagtaaatcaataaataaataaataataactctaaattttttttgaacaaaacgaatgatcaaacagtaaaaataaaatgtaacaaaatattaatcccttatattatgggacatagggagtatgttttatgcactgtgacaaagatagtggcttggccggtagtaatagatattttcatgcactgtgaacgtggtaacagggtttacaggcagcgaccaacattttcactgcgagagttcaaaaaactgttcttttcagtaaaagagaaaaaaagaaatgaaggtattgggtttgaaatttaagcgatgaaacggcaattgcgtatcctggaaaattttaaatcagtaaaaacaataagaaggcttgggggtgtaatatactgtacttttagccctgcgtaagatcaatgagatatataagttaactatttctgttaggtagcagatgtgtgacaaactggcttgtgttgctgaaatcagcccagtacagcttgtcttcccagttcccaaaatccaatccaatatatgcaaccaaacaagcttatttgatgttcatttctcaattctcacgttacatatgtataatcaattacttgactgctttaaacctatacatgagaattctggactatgcacatttcgagccctcgaaaccctatgtcagctgattaccttcaaaactttgcgccctatgttggagatcagtaatacctccactcccatttggggtataatggcacgaaaaggaaacaactgtatacatcaaatatacaagctatctagggatctcatgaaaaccactgatttcatcaaggagcaagtacaagaactttaatggtgccctgactgttagcagttaacatggtagggctatcgctcttccagcagactgcgctaataaaataagagccaggatcatcatctgcatcatcgagatcagatgatacaaatctgtggttggcagcaggttttgagatagcctgcaattggtacagagttacttgaagttagaatggtatatggtgccacaggagaccaacctgtacagttaagcatggcacataatgctgaatcacagatacggaaacaagagcaggcaataagcttgcaattaccttgtggtaaacaaaaacctcattcgtttcactcccgcaggcaatgtactcgttatttacagacagcccaacaaagttcttttcattcttgtgccctctgaatgtccttacctgaaaaaggtaaccattttaaacaaaaggtcaacaatctgttttctgagaagcctagcatgacgtaactactaaaccaagccagactaatagatgagctaaaaaagaaacaaaggtgaaaacaaatgcttatccaagaatttcggacctaaccaaaggtttttcaaggaccagaattcttcgaaaaaaaagcgaagcttctcaaatagttttttcccaggaaataaagaaacactatagctccaatttttatcgatatgaaatagagtatatcctaaaacatcactttttactaataagtcatagctgcttaaaaggcaaaaacataatttcataattgcagtgcaagaaaaatctcaatgacacatacagggcaattttctttgacatcccataaccgtaatgtgctatcagttgatgcagacgcaagctcattggtggacaggaacttcacataagaaacagctttcttgtgcccaccaaaaacatggacaggcgcacttggatttcgcaaatcaaaataatgaatatggtgatcagcagaacccacctgcaataatgtaacatctggtaaggaaaaaaaaacttatatttgatatgagccaagaaaatcaaaggaacatactgcaacatagtggctcgacccaggattatatttgacagagcaaatattggccttcatatcaatattgatggcacttgcttcttgctttgtgcaccacactttgacctagcacaaacagcagtaggttccataaggtatactgcaatacagatacttccatctatgcattcaatgaggttgggatagcctaggtagaaaaatgcaccattatagaaaaagggacatgaaaaactgataaataaaataaaatcctagtatgttgcataacatgcgatatatccaagttatgttttactgtattttgagaactacgcaaagttttcttgctttcgggaataacaaaagtagttgtaccattgaaatttgcaaataccttgcaatcatcactcccagatactagcatcgagggttctgttcgagaaaaatcaacactccatgctctcttttcatgttcttcatactccatcacactctaaagaagattgaatacataaatatcatgaatccaagttcagaaaataacacaagtgtgcaaaatgaactgtggaacagagcaagaaatacctggcgggtttggacatcccaaacagttactataccctcatagtcgctgcttgctataacattttttgagtacttgttccagctaaggcagctgagtttagatctagtagccatttcaacaactggacaatgcacatctgatggttcattaacaacctacgacataagataggccaaatttgagtattttcaaatactatacaggcatatagctatggccaacataagattcctgaaaaaaaacttactgtagaaaactcgaagactttgatgcgctttgagactccagcagtagcaaatagctcatcatcacggtcaaattcgatactgcatttaagaaatatcaatgtgattccctattctcatgtaaggtaggcgactgaaaaacatatgagattacagatagacatggaaatgaaaattatgcaccaaaaaaacaggcacaaacttatagtcatattttgttccttataatacatgataaacatcagcattcaagattagtggatttgtttgctaattgaacatagttgaagtttgactcataggagcaatagaccatcccccctccaaccaaaacctctcctcagctcactgctggcttgaggattcagctatgacaacatccacattgccaatagcatgttgatgcacatgaaataaggcacatattttgtaaaagcactaaccttgatacgatatttgcagagtgaaacagatctccatgtcttagctccgcaattacacgcaagcgactgaagcataaatgacagagaacaaaagaatgataagccaaatgaataggcataaccactaccatgatcataatgtgctaaaaaggacaaataatcagcggacctatatcgtgtgaatgttgttagcacagactggaaatcctcaagtcctgcatgataaccttctttatttattgttactatgtctctttcctccagcctacgtgattgtgctccggtacgccgtctttgaagatagtattcttgaagctcgttaaactgcaatatgccccatagcacattagcatttcatcttacatcaaaacaaaataaacatataagttcctaatctaagctgtctacatgcttgcaatatgatagtaccaaactatcaagcgcgcaatgggagaaacaaacctgagcttgaactcgcctcttccgagcaataacgttgcctgattgaataggggcactaggaggatccgagcaagtgagaacatctctcctttgaaatccttgatgactaatttgacctttcaagtcaagcttcttattctgtaaaccccctggatttgatgtactaagtggtccccgagagttgggaggaaagagaccactaggtttatccataggtgagggccacatctttgatgcagcaggttcatccaaaagcatgcggagcttcattgagtacctttcttttgttcgatataattctaacctatgtctctccacagcacttatatcttctttgatgtactgtaggtcagtttgaatctgtgtaaaaaagaggttaacatgattaacaacaatagacatcagtaaaagattatttattgttgtaggtagcaagaaaaaaaacctgcatactgaaaaatacatatagacaaacctcattcagctcttccaacttttgctttctgaggcaatgcaagaagaccagcaatatttgcatatttgtttctgactcttgctgttccatatgccgcttcttctccgcgatcaaagtcataagactatctagttctttaaccgccatatcgtttccctagaaaaagaaagaagaattaaactaaaacatatgatagtgtttggtcatcattcatctattacttatttagagaacgtcagttttatgtttgaattttgaaacagatataaagtcagcaaggtagtgcaaatctatcttctgtggtatacttggtttatcatatggacaatccttgtaacagttaagaggacgatagagatcatgtggctgtaagagcgaaggaacaaaagatactttgatatcggtcacagtagcttagattctacaattgatgcaagagataagcatgttcagtgtagaacttaattactactctgtactacttagttctgaactgaagatcacaagcacagctaaggtacggaagcaaaattttcacagtacataaaaccatttaggaacataccactatgtttaaggagctattgaaagtagacattttcaaaagtaaaacatgtgaagtgactgacctgttgcagtgcatatcgaaattggtctatcggtgatgctgtcttcgcaatttggcgagctgacattttcttcaagacctatgcagacataaatgtgataaacatgcttagagatacatttatacaatcccagtatcaagtaaccagtaattacagcttgttttaagttttaacagaactagagaagaactctagtgatgaacaaattatataataggtactgataaccagagcagacatagaactaatactgtccactgctggtgattctaaacaaaacttacattaacaacaaactgtaatgtaccgtgcaagtcaaataaaactgagctatccaatcagaacacctgctactacttcagaagctaccacaaacagtagtacaataaatcgcagctcaagcgctgaatactgttgaatagttgctacaaacgaatcgaaaggcatactgttgaatagttgctacatttgttaaaattggttataccggatacctatcccaagccacatccaaaggtacattcagtgacatttcaattttttttttttgcggggcagtgacatttcaattacaaagccctgcgtttgaaattaggataggcatccaaaattcccaatcgatcggcggaatatggaagccacggccaatccattatccatctcggctgtgtaagcagaacgagcaagcaaaccttgtcgaggaggaagttggggtagagctgcgccttggtgaggtagttgccgcagcaggggcagtcgctcttgtggctgagatgcgtgacgatgcacatgtagcagaagctgtggccgcaggcggtgaggaaggcgtccttgatgaccgccatgcagatcgggcagaggaggtccctgtcggccgcggcctccccgttgccccccgcggaggcgcgcgcccccgcatcctcctccccctcccccgccaccgccaacgccgccgtggacgcgtcccccgacggcgcctgctcctgcttcggcaccgatggcaccagcgcgccggccaccgtcgagtcacccatgcggcaggaggaggccgccctgcggtggtgagtcgagcaggcggcggcggtggaggcggcgactgggcgtgaataattgcatacgaggggtgggtggtggtggtggtggtgtggtgtgtgtgggagggaggggcgggtggaggaggagggaggggaattgggttctgtgtgtgggcgtggaagcggaagggtgtatgggtgggaggagaccacgtcggggtcggggtagcctcgcgcgccgcggcgctgcgggcaaatgtgcgtacgcgaggaggcacgcacacgacgacggcaaactccgtctccgttcctctcgaaggaaaaaacgaagtttgccggtctcccaatggaacgcgtgctttcgatttgcgcatttaatccgagtagtttggtttgcttaatccgtgcgaggaatttggcaggtcgggacggacgcgtcgcgaagcgaccgggggagtggttagagtcccaattgtcctcataaatgaaaaccaaaaattaaaatttcaaacttgagaattttaggtcgctaaaacatctctgtaaattactactaccttcatattttaatatatgacgctgttgactttttatctaacgtttgatcattcgtcttattcacaaagtttatgtaattatcgtttattttattgtgacttgatccatcatcaaatgttttttaagcatgacataaatattttcacattatcacaaaaaatttgaataaaacgaatagtcaaatattgataaaaaaagtcaacggcaccatacattaaaatacaatacggagggagtactttaatttaggtaaccgatgagtaaccttagtttcagacgtgctgggtccggttgttatgtgggttacaaaacagcgctgcattgaacaagtgggtgtggtgaaatggatgttctgttagaaaattcttgtaagagaagatcatgcgtgtttctgggatcattctccgtgtaaaaaatgcatcatctccatggccaaattggccactggatgctatcactgacccggtgcgtgagcccgtggccaccacacgaattctgtacggctgtaccgtattacaggcaagggtttatatttccaatcgaggtcccgctcctgaccctgtcagtataacggttttcacgaaaaccgtcaaatttcaaacaaaattaagaagccaaattctcaagttccatttgcccgtcaatgaaaaatgatcaaaatcaccgaattccaaccggaactaccaggatttcagttgattcgaacaggaaaccaccgttccagtgttttggaaaccaaacaaaagcatctaaaactcattggatttgctgaaaagccaaagagtagcgtgggaattaattgtgttttctgaatatttggataataggggaaaatgtttgaaatatgagaaaattcatggagatgataggaacattgcaaactaaaaggatatcaaaatggggaaaccgtggaaacgtgggaaaatgtaagaaattaataaagaaattcagcatgacctttcctacaatttgacaacctcacattgagaataagcgcaatgtatattcatgaacacaaatacaagataatttgaagtccatatcattgacaattaaatatgcataaccaaatatatgttacgccattaacatcaacacgcataatataaagtacatcaacacaatacaaagtacacccacaatcaatacatactgtaaagtgcataaacaacatagtataacaacaatacaaagtccataatataaagtgcatacacaatcaacacatattgtaaacccttctagatgtcttttttcaatttaccaattcagttgttgtccaaagagcattttcattctacgcctatattttttgacatttcatatgcatgtatttactacaaatgtaggactatttacaagttatttttaaaatattcttcataaattttcaattcaaatttgaaaaattctgaaacgattcaaaaattccaacagaatttgctttcgcgctgcgttgaaacgtcagagttgtgaagtgtgaaccctaatctatctgatcaaagccttctttttttttggattgatttcatccaggagagatgtcagctagacagagacgatcactgatcacgcgacaagttgccatatcagagacctcaggctagggcaacacactgccagcactaacccatacttaacgaggactggggttcagtttataaaggagtcaagagttcaggactgattcgatgaccgatttcagtcttgctacattctatcactgtctggaatgataagacaaaccaaaaacgaaatttcaatgttttatactacatcctatcgatctatctgaactgagaagagacgctgactgaattgcctagacaagaacatagaacatccaactccatcactaagaagcaaaattttgcaggtaatgcctgttcacgatatagtttgcaggtaatgaccaggtacactttcttatgccatggtaaggaacgccgagctactactgttcacttcagttcagctcacctagtcactcgaccagctcagcgagcaccttggtcacctccttggtcaggtcgccacggcgcagcaccaccgaaatctcggcaatcctctgcttcttgatcttcatgtccagcgcatgcgccttgtcgtcatcgagcttcccgaagtccctcttgaacaagccagggtgtgccgcctccagcaacttgacctcctcagcgaggtgcgggtacagctcgcacatctcgccgaactccctcggcgcggtggtggtgccgttcaccgccgccgctgccgcctcgctgccccagacgctcttggagaggtcatagagccggcggtcatggcccttgcttgggagatcgcccttcttcttagcggtggattcgtaacggcgcttgagagtgctgaccttcccctggagctccttgcggccgtagccagtgttgtcgaggctgccggcgagggtggcgatgagcgcgtcggtctgtggcagcgacccgtgctcccggcggtgcgccgcgagcgcctcgaggatgcgcacctcgtcctcggtcgaccagatgcggtggaaggcctgcctcttgggcgacgagaccttcgggccattcccctccgccccctgcttcggagccggattcggcggcggcggcggcggcgcctccgccttctcggattcggacgactcgtcctcttcctcatcggacgaatcatcctcctcgcgattctcctgcggtggatccctgctcttggtagcggaggagcgcaccaagtcctcctcctcctcctcctccgattcctcctccccggaagaatcggactccgcgcccttgttagagaccacgggtgcgggctgagcaaggggactctcctcctcctcctcctccgactcgtccgagtccgagccggaggcggtttcctctgaggaggcaaccggaggcggcggcggcggcggagtggggcgcttcggggccatcgccggagctagggtttggagggcggaggcagaggtgggtggcggtcctggcggcgccggtctcgggacttctccgtgcggcgtgatattggattagcttgtagggcttgttggggtcttgggggttacatcgaccgttggatttcggtgcgtagcccgcatccaccgttcattttccgatcgtccattttttgatcgtgatcggatggcttattgggctaaagattttatgggccggcattttagttcaaaatcgaggcctacacatgtacgtgggccgggattaaagcccatctaaacatggtctgagctgggagtgtgtggaccagggtttacaattccgacagacgcttccgtttcgggcaccggtggaattcggaatttcgcgaaatccggtggaaaactggtaaattccgaacaaatttcataaaccaaaatttgaatacaaattccctgagtttgccgacaagttcttgaaaaccgatcggttttggtgaaattccgatcgaaatcatcaaaatttcgataagtaatccggcccatctaagtgttttccttttttaattctttattcttttctttcctgatgtaagtttcagtaaatacacacaatatatcattttttttcaaaaaaattatatcccaataggttctatgaatatcatattatttataagattttatttgattttttccttttttatcaattcaaatttaaatttggatgaaactcttcgaaatctcagacggtttctacttttgagcctcatcgaaacgtcacaatttcgcgaaatccgacaggatttcatcggaatcgtaaaccctggcgtggacgatcgcgggatccgacgggagaacgcgcgaaccagacaggtggccgttgggcctattctctgttcaggctttgatccaaataatctgcaaatttgaatctgaattgtttgtcgccctatcgacttgaactccatgaagatcttatcttgaagtctgaggatgcagtccaatgatgcccttcacttcatgtttttattccttcttgttaagatttccccaggattcatctggactcgatggataatttttccttttttctcctcctaaatttgatgctccttttggctagggctcagaagtcaggacacaggagactggggtagcgagtattcagtgcaatccatcctgttaacaggtaatttttgcaccaaaagaagatcttttgttgttgcacataagcacattcctgtcagatttcaaaacgagtacaagatcctaaatttcagcatctaggaagtaatatgttagcgatgcagtaatttcacgtatccagcttccaaattttgtcagaatctgcgagactgcgactactgtatctctgcagtacaaaaaaaaaagaggaaggccttgtattttgatggatacttttatgaggataatgatggttctaacattattctctgatgaattgtttcaatagcaacattacaatatgttgctaggtagacagcatggttacagatcgggaccggatatgaaaaaacattcggttcggttaacactgtgaggccgtcaggtgcatcaagctggatgtgtcaaacagctccatgaatctctgatcagtacttctcgccttcgccgctgcaaaatgctggtactcgtcgaaaactgaagttaggcaccatttctgcaactttctcaggcacccaacgacgcagccagtccggtgctgaaacatgtggaatatcaggaaaccgtcgaattcccatgtagcaaaaggtttcaagaaaatgggatatcagggatgtgcaatgctaaatagatatagctaccttgcctctcttgcagtggatgagcaccggttgattccttacgtctgaattgatcaaaacgataagagttagatacagatagtgtgatgaaattttgagacattggatatatctttgtagaggcagataccaagaataactttgagtgcttctcggattttttcttcagggatgtttacaagcagctcctgtaacagcaaggttcagattattgtcaggctatgcatcaactttaagagtcaacaggattgaagagaatggtcagttggatgcatactgaattactgatgatatggtatagcaatagaaggatgttttaatttgtttcacagtttcaggctaatgcggtaactgataaggttcacctttatcgaaagttcagatgcaaagatatcgtcatgccactcaagtatgtactacattattggttctagttaacaaagaaacaagcttagaccctgtttagatgggactaaaactttttagtccatatcacatcgtatgtttggacactaattataaatattaaacatagactattaataaaacctattatatgaccccggactaattcgcgagacgaatctattaaacctaattaattcataattagcctatgtgatgctacagtaaacatgcgctaattatggattaattaggcttaaaaattttgtcacgcgaattagctctcatttatgtaattagttttataagtagtctatgtttaatactctaaattcatccgatatgacaggagctaaagtttagtccttgatccaaacaccaccgtacaatccatctagcagtgaccatcctagaatccatctagcagtgacacaattattaccggtgaccctcgtaattcagtggtttcagacacctagcttgagtccggcgaaaaagaagcatcatctccagacaatgtcaaagtgagcactaatttccattcacacacttgtagtaaggtcagccacctgatcagtgtcttttcactcagcgatatatttcttttttgctgggaatgctaaagttggtcagcacatctgtgttgtttatcatcgacagcaacaatcgccaatgaacgatgaaagtttttttttgtttgaaggtcccaacttaactcactcgattttcacatgcacatttttttaattactgaacggtgttttttttaacaaaaatctatatgaaatctatatgaaagttaatttaaattttatattcatattaattttatttttttaaaaaaactaaaacttaattaatcatacgttaatgagttatgtcattttgcatgaactagggatgaatacctaacccaagcaacgacctcagccttaagtcgccgacgctgaccaactttgaccatttgccgtggcagttcatgccttcatgaacccagaactgacagtggaatatgttctcattgttgcagacttgcggtggatgctaccacgcgatgacacgagtactaaagttgcgagatggagtaatataccgacatactccaaggctactatgcgtctatgcctaaatgaacttttaatatggacagcttgacaaaaccgtactaatggctttcagtgaaggactagtaaaatgagaataaatatggcatggcacacagagaaatggtaatcttgggtggctggttaataacggaattaaagtcatggccaacaaatttatgaaagaattacgctggtcagacgtcactcgacagttaaaagacaggtgcgattatactataagtcaacttgatcctctttttttttcacataagttctcttaaaaaaaataatgggcataagtcaacttgatctttgtttaggcacccaattcacagaggagactccacaagcccatcatttctcagctactccctccgtctttctagattcaaatttaggattagttttttttttgatagagggagtagaacttgtgctgtactgcatcactgatcacttaagcttaaggtgttttctttttttttttttacccttaaagcttgcagtattcagtaaaactcagaaccagactggcataatgcagacaaaaatctcctaaccctgaaatgcgtgatgctgaaatagaaaatattttccttagccatgagtctaccaatcagtttgaactagcttctagaaaagtagcacaacgctaccagaataatcataacaaagataagctttactgttgctaatggcagtaggccagtagcaagatacgcttttgcagcattgtaaacaacttctaatcttctatgggtgctgggctgacgcaagaacccgcttaactgacactgttgttttgcattgtaaaaaaaataactcctaccataatgagattttctacactattttgtgagaagggaaaacgaattagtgaaataagaacataaaaatagtagcgcactagatgcattttgctcaaacagggtgttttatagtcaccatgcaccacgtaaccttgtcaatttaggttaacaaaacccaaaaacgataaacattttcagcctgaaagactcaagcaaatgccctaactgaaaggggcaaagataaagcaagaaagggacttttgtttgttctagttgagttgttgtttgccctagttgcgttgcccccaagtgttttgccgaagcaagcagcaatatcagttgtcagttcccatgtttttttaacggaaagtagtcgaacgagctcatggccatacgacacgaggcaacgcgcagaaaacgcaagtgcgtgctcatgtcaaacaggtaaacagcgcgttctacctaaagtaaccctcgcatccactgtaatgcgataccagttgctatttctcggtgcaaattatgtgtgcaaattatttatctccacaagcagaacgcaccaaatcgaccgaaaaaccaaaaaacaattcgatgcgaagatcgactttgccatccgtggaaaataaagcagaaaatcaaaggactcaacgcatatgatttttgacttgttcatttaccttgctgccgtcaataccgaactggtgaagcttgatgccgttctgctccagaaaccgcgtgttctcctccgggtacggctccgggcacaggtacctgcaccgatcaaccacgccaaggcgtcgccgccgccgtcagaacacgtaatcgacgagctcgccgccacggtcgccgtggccgagaaagagatcctaggtataggactcacacgatcgagcgtagcttgagggagaggaggaacgcgaagttgtcggcggcggggaacccggagcggaagatgccgtcgttcacctcggcgaagttaagcggcggcaccagcaccgccgcggcgtccacccacggctcaatgctgaagacggcgcccaccgcctcctcgccggcgcgctgctggtgctcgccttcctcctccttctgctgctggctcctctgtctcggcgaaatctccagctgcatatcctcctcttgggcgcgtgttcgtcgcgtttgtgcttagtagaaacggtgttcgcgcgcgctcgtgtcgtgtcgtgtggtgggatgagagactctcggcgagagtgacggttacttatagaggggaggcggaagttgggggaggataaagaggggcactatgtacgtcaagtacgtgacagtacgcgtcccgttgtaagttgtaaattcgtggatgagcgtgaccgatgtgggttggcacggctctgagagaggaaatttttaggcgagagtgatgcgacgatccatttcacctagtgttgaaacacttagcttgtaaatgcgcaggtttggtcatgtgatagctctggcgaagtgcggcgttttatccgtgctcaaagcctaacgccgcatgctcttgacctcttgtacaaggaccaaggtcacgtgagagtttcatgagacacatatatggaagatttaccaattcctgcaaattcaatacgcgctcttatgtgcaattgttttcgaaacttagatcatatgactttgtgcagtctataattaaattactaatatacagattatactttactatgatacatatatcagtagcacgattataagttacacaaagtcagacaagctgcatctactcttagaaaattttgtcttccatgaaaggtgacttttggtctgagctctctaaccgtaaaatccagcagaaatgcataaaaccatcagcatattgtattgctgtcgtagcatgactcgtctgaaggactgcccagttcactggactatgggccatttcattgtacagttcttattttcctaacccgtccttgaccactgatctgcggtttggtaccgacaagaaagcaaccctcgtggagataacaccacaagcgggagcagagcatcaaagagcagcagcaaacatggtcaatcaatcgatcgatcgggtcaggtcaatcttctatcttggtgttcgtggtgtgcacgctacgaattgcattgtggtttgatcgttcgttgacgctgtgaacgattgatcgagccacatgcaagtccgcagccaggtggcttggtcgacggcagcaagcgccatcctctttgaatctggaaaagaagttacagtacacatttggacccaaccagataatccgtattggatcagaaggtcaatgttagaatcttgatcagtttcattgtcgcgacagatctagatccatgtcaagaaattcagacgtcctagaagattataggtaagtatggattttgaccaaagttgtctgagcacagaatccactacaaagtctacaaggcacggttagtttgtgttttcttactgtatttacaaacacttttttaaaaaaaaggggattttgaaattccaaaatggcaaaaggcagcattatttacacaatacacaggccttagggtacgctcatttcagcttataggattagattctcctcgttttccgttagcacgtttttcaaactgctaaacggtatatttcgtacgaaaactttctataaagaagttatttaaaaaaatccaagaaatttattcatcaaaaatttatatattaatacttaattaattatatgttaatcatatttctcgttttacgtacggctaatcagcctatcctaactactgaaacgagcgcacccttagcccttaagctctcgcacgaccaacgaaaactccccatctgcaagcctagtcaggatgcattatcgcgcgcgtggctctccagtcgcattccagtatagtgcagcagatcagatcagataaaacctgcatgcaacatgcaaactatatatgcaagggcgcaaggctgcatcatcaggccactaataaacaaaggggaaagggatccccccccccccccccccgattctctgaaacccgatttgtcctcctgtcgtagtgttttgcttttgcaatgtgtgtggctctcatttaacagtggatcatcctacctaaaacggtggctgtggattaccggaaagagaaaacaaatcaaatttgggtgcaatgttctgaactattttcagtactttggaaccctgcagatatcattttctgcactccagacaatgaagggcacactgtaacagtcactactgccgctttgccgcagaaggcttcactagtcatcatcgccgtaagctgcaagtgcaagttatcaagtggtttgctccgtatagactccaaatgctggtacaattttggacaaaagaacacaattaacaaggttctgaaaactagaaatgcatgcggcgttcgttacacaaagtcgtcgaacagagaaaccatggttccttttgacgataaaaaacacgaagtcccattgcgtatgaactctagcttcttattgggggtaaaagatactgtatccaaccctgatttatattcagaaacacaaaagtttcagactaaccgtgcattttcagagtatcgtttatccgtttgcaacctttttactttaattttagcaaaaaagactttgagttggttgtaaagtggtaattgccggtgaatagcatgccgttgcccaatcgctcagctacaggcgatctacagcatgcaaaatgccgggcgggccaatggatgggacgcgacgttgctgcagagttgtctcctttgcgaaagcgattcgatatactactcccaagtggccggacggggcaaatcgggcgcgtttgggttgggaaaaaaatgtcacgatatgcaaaggctacagagcaaattatgaaggctagtccatgagagaatataatgattggtaaaagagattacgaaacataccgggacgaagaacatgaaattcaatttccaaaaatagacgctcgagcaaccaaacattcggactactcctaataaactcccaaatgaacaagcaaatgcactgtcagagtggcccgtccgttcgttatcttatatattatctgacgactgccacggcatttccaacaaacctcatccttcatcctccaatggtacagcaacctcgggcactttacaaaggcgcacggtgcacgcacgaaacgaacatcctctccaagattggcgccggtcaggtaccccttttccttttgattaccaaatccatccgcatccagtgtcctgttcggatcgcaaagctgcagggccccgatcgagatgtttggttgcttttgctacatatatatggccttctcctagctgataataaagcaacacacttgttcataaatttgtcggtcactttcggctgatccgggtttcatttcatcacacaaaagctggtgtatcgcaacttcgcaactcgcaaggttgaaaaccgaaaagttcattcgatcggccgtggaacagtcgaaataaagcccgtattcaccgaggcccacatggcaaaactctggatggcattacgaagctgtgggccgtgggcaccgcgactcctacggacgcggcccccgctgcaaaacggaataagttcactttaggtctctctatttgttgaccagtctgattttcgtccctaaccgcaaaaccgggtacgacccgtcccccaacttacgaaaaccggcaaacgagatccctcgacggttttgatagcggttttggctgacgtggctaatttgacttggtcttcatatgacgtggcactgacgtggcgcttatgtggcaatttgatccgggtaaataataaaacccgtgggacccacatgtcagttgcacacataaaataatataaaaaatagtgggacccacatgggtcccacatgtcatcctcactcctcatttcctcctcttctctcggcatcttcatctctatcccatttcctctctctctcctctctccagcagcgccaccaccacggactccgccgccgctcccgccaccgccacatcccttgccggtgatccagatgaggttccgcggtgtacaggtggatctcgtgtacgccggcgtgtgcctcccgtggtgcccgacaacctggagtggacctcagcgcgaccggtcggtgctccgcggccttgacgacctcgccacggcgcgcagcctcacggcatccgcgtggccgacgagatcctgcggcttgtcccggacaccgcggcgttccgcaccatgctgcggtgcgtgaagcactgggctaaggcgcggggcgtctactccaacgtcgcaggcttcctcggcggcatcggctgggctatcctcgtggcgcgcgtgtgccagctctaccccaacacctccccagcatgctgctcccgcgcttcttccgcgtctttgcgcggtagaagtggcccagcccggtgatgctgcgcgccatcgagcacgacgacggcgagctcggcctcagacgccaccctgcgcgtcaccaccgagcagctcgccgtcggcgacgacgtctgccaggagatcgtcaaggccggcgccatgtgggtggtgattagttaagtactgcttagtcttaatgatcggtaactgcatgtgttgtagcttgactaacaaatcactgagtctgagaaataagagtggaagtgtagctagttcgccgcaagctcgtgtttgtcccctgaagtatttgcatcacttgtgtattccttcgtgcgtgtgtgacctcgcgtgtgttttgttgtttctctgggccaaagctcacagggctgggtggagtcgcggttgaggcagctgtcggccagggtggaggcggacacgtccggggtgctgctctgccaccttcacccgcaagcgtacgccaccgagcaccacaaggagccgcggcggcagcgggagcgggaagccgtctccgctgcagccgcctcgacgccaaggatctctgggcggcacgccggcgctgcacggatggccttgaggagagcagctagctcgctcagatggccttgaggtggtcggcagcggcggcggcggcgatgtcctggccgtcggcgtctcagcgagggcgacgatgttggggaagtccatggccacggcgtcctccgtggtgaatcagtcctcgttgcggaggagctccttgctgccggcggcgaccatccccggcgtaggcgtggcagtgcacggagcatgcggcggcgtcgacggcgaggtccgcctcctgagcgccgtcagccttcggccttcccgagccttggcacggcggacctcacgtggtcctctcccaccagggactgagagagaggatagagataacagatacagtaagaggggagaaatagggtgacatatggggcccatcattatttttattattttgtatgtgcaactgatatgtgggtcccacgagtttgttttccagatcaaattgccacgtaagcgccacgtcagtaccatgtcagataaagactgagtcaaatgagccacgtaagcgccacgtcaaccaaaaccgctatcaaaatcgctgagggacctctttcgtaagttgggggacgggttgtacccggttttgtggttcagggacgaaaatcagactggacgacaaatagagagaccaaaagtgaacttattccctgcaaaaccgaaacgcggaaacagcagcggcccgtgcagcggtgcggcctggtagtcaggggacgtcgtccgttggctcggcccttcacgagcgcggccgggtgaatctcgtgttctcgtcgacgccgctgcgtgcgttcgtgcgtgcgtggtgctcagcccgtctgccgtgcactccccgggcgagcgcggcgtgcgtgcgttcgcgtcgatcgtgtccaagtccaatcacgtcgcggtctcggctaactagtgtgttccggcctgctacgacgtgccgtctcgtctccgatctgtaccgcacaagcacagctgtttgcaacaacagtacaccggggaatcgaccgatcgatcgatcgatcgatcgagacgtgacgtactccgtatcaactatcaagagtcccgtcgcgttatccgcttatctgttcagggtgccagccaaagagccaagtccgccgcttcgcgaaacgccacggggatgccggcgagcgaggccaataatttaccacactctcctctactcgtgaatcagtggtagggtctcctcgtcgtcacgacacaggagtagacagcgcgatagtgcaccggtggtggactttgccaatggcagctagtactatatacgcatgcggctgctatttgcaggaagcgagcgtgcgtgactagtgaaagccatatgggctttctatgataggagagcaaagtgcggattgatcttttctttcacttcgcatgcacacacaaaagtatgggaagtactcctgggaatagtaccatgtcgacattctcctcatcggcctgagcctgccactggccagtttatatggagtatatcattatatgtactgtacgatatactctacttcgtatcaaagtgcctaagctagtggatgccagttctgccctagtgtatgttaccatgcaaggacatttgaaattaattaagcaccatcttgattcttttggaataactcatcagaaatatgtatcgctatggctatggtttcgtttgcagagcccataatgcatataatttcatccatcattcactggatatttggatcaggcgagccatgcccatatgccccggatacgcgatggctcgggcctactgcacgtaaacagccgcatgggccgcagattcgctatctatcccttatcgttcactcctcctttcgtcctttttccagctttcccggagaaccggatgaaacatcgaatattttcgatctgcccagttcagatatcgcaagttaggctggttcgtgcaaggataggacaataagattggccaccttcctacgcctagttgtgtgtactggtgcagtagctactgctgcttttgtttttatcataaatcgttttaacttttgccctagtcaaacttatctaagtttgataaagtttatagaaaatataacaacaattctaacacgagacaagcataatattaaatatatttaatataaacataattaaacataaaaagatttgattagaaaaagaagtcaaaaacaactaatgttacgatgaaatggaatagtattagttacttttcttttgtgatgttgcagttgacacgacagagttcagattctggcttctaatttgcttaattagttcgtcagtggtagagaaaggatgcagatatgcaggaaatgctgaagaaattgtgtggctaaagtggtaaagatatgaggtctcaagtgcttagccctcgtccctgtcaccttaaatacagattggcaagcaacagaacagatgctagactttcttcgtgatagtatagttaacctgattccgatcgaaagtttgcatgtcttcatcgagcagcaatctttcttcctgtctggaattccgcattagaggttaacagctaggagcacatatgcaaatatattcgtgcactaacaagtaacaagtggcaacatccaattctcactcgaactgcatagatgaagctgcccaacatgttcatgaaagagaacaattttatcccgatggaatcgcagtatttcgtagcttttgtaaagcgctttgcttcggaaagaggaaggaaaattcgcgtctaccaacgttggctaattaaggtcgtgtcgtgtgtgatctggaaaaacattggctgcaggacggattagattgagattcccgtgttgggcaaaatttttttttttcggaaaagcagctagacgaaagcatgtcccgagatcacaatcccaagtatctcacgtgcttatttcatagtactactttcatagccggcaagccctgcaactgaaggtacgatgtgttttcaagtctgtggaccatctggctggctgtaaaaataaaagcaattcatgtttttggaggcagattgactgcattgcctgggtctgaaatgtttgattaatttcacaaacaactgatacttagatcaaaattcagttaaaattttaaaagatatattacaaaactataaatttaaaccaaatttatcatgaaaacatgtgtttaaggtattgtatcgattaaatattaaatagctgaaattagaaaaatagcatagagtccatataggaatttaatattagaaaaatagtatagagtccatataggaatttagaattagctaaaattcggaataaaaataataaaattaaaagtagagtttggagtccatatagaaatataatttacaaataactaaaattcaaaattttaaaaataggaagaagaatctaaagtccatacagatatacaatttagaagtaactgaaattcaaaatataaaaataaagaatattgaaagatgattttagagtccacatataaatacaataaagaaattttcaaaatttagaattgaaaataaataatattggaagaagagcctagagtctatatagaaatacaatttacaaataacgaaaattcggaattaaaaaatgaatattagaagacgactctagagtccatataagaatataatttagaaataactaaaatttgatattaaaaaaattaataactatcacatatatacaatacaatatgaatattacaaactggtaatttggtaaagttagtacaaaatttaaaattagagtaaagtgcattggcggtacttaaacttgtagggttgtgtcatataggtccttaaactctcaaaatgcatatccagattccagaacttgtcaaagtatatcatctaggtcccaaatcgacacatcccctataggatctacgtggcactaatgtggcatgccacatggacgtgacgtgtcattttttttttcattttttccttctttttttctttttcttttttgttttcttctcattcttctttttttcctttcttctgcttgggtcagagagaaaggagaagaaagggaaaaaagagaagaaaaaaaaataaaaaggaacaattttaaatgggtcctatttgtcaattaaaatgatgccacatcaacgccacgtaggatcctgaagaggttgtgacgatttgggacctagatgacacactatgacaaattttgggatttggatatgcattttgagattttaaagacctagatgacacacccctacaagtttaagaaccgctggtacactatactcttaaaattatattatcattttaatatattttaacaataaattagaaaaatatatatactattatatgagagaaaaatataatgatgctagccacacaatctgtgcgggccaccatgctagtttattaaaattttaaaaagatatataaaaaaactataaattcaaacctaatttatcatgaaactatgtgtttaaggtattgtatcgattaaacatcaagtttcatcacaaactatatcttttgtaactaaaatccaatagttctatggatctgaattctagaatatataggtttatgacaactttttcattaaatttatagttttgtgatactccgtctgaaatttgtagttttagtgataactttactagtaaatttataattgtgatctaccgtcttaaatcttccattttgtaataatttagttcaaatatatatgttgttttgtgaaatttatttgaaatatttctttgaaacgagagtctaaattctgacttggtctctgaaagaagtccttgattagtttatgggctactatagtctctacacactagtgataaacatagaactctagtatatatgcaaatgtcattaactgtccacttgttgacactgaccaattttgatgagacaaagtataataagatgaaaaaacaacactagtatgcagctaacagggaggtccacttgaacaagcagagtccatgtaaggtgagagactttactttaatccaacattccatcagctacgcattgccgacaacgcaccaaacaaaaacagatctcgtttctacggctcgtccggtgacgttaacatccccagattccctaggctatacaccacgctgatacgccatgaaatgcacgcaacaccgcagcgtgcgagctggaaagcagcagtgtttcgagcgtcccacgcgtggagcaatggaggtcggctcatgcttccaaaaaattggtactctagctagttaattactgcctactggtgaatggtgattccggccaaacgtgttcagctatcgtggaattttgctgaggattcagctaccggagtgtaaaattttgctgggtctttcgccgcctcgtagtcgtatcgctatcgtggaattaatggcgacggcacgtagcttcaggtcgtctctgtttcacagcagcgacaggatgacgaagcgcagcggcgcgagcgatcggccgactggtcagtcagcggggatggacggcgcgtcgcgcgtcaccgatcgatctccatctctttcacccgcgatcttgcaaacgctctcggtgccgtggcctcgatgggagaggatctttccggcgtcgcaattagatctccctttttgtttttcgcactggagttgcatggctatatgcaagatcgaaatctaggccggtactgaagtttgaaagttgcgaaagcagagaaacgtcttggcacgatcacacggcatctggataggctacagcgaacgatgatcggtatatatccaggcaccccgttcttgatcttgtccattgcatgaaagtctcgcactctcgcaattatatattctgagttttcagtgactgcagcttgagaacgttttcaatgtctgccgcttcgttgaagcattttggtgcacttcgtaattctctgaatcttgacttgcgcaattctccatatcatatatagcgggtataacggaataaaatctccatagccactagctatgtgttttttttactgcacttcgtgcgcgtacatagaggccgagtttagatctaaattttttctttaaacttccaacttttccatcacatcaaaacttttttacacataaacttttaacttctccatcacatcgttccaatttcaaccaaacttccaattttaacgtgaactaaacacacctagaattagattccagacactcggacaaatatcaataacagaagccatgcatgcctgtgatctttttgccggccggtggctttgcaaagccaaacactgttacttggatgggtgtacgcgcgaataatcctatggtccaccttttccttgatactagttgataccccgcgctttgctgcgggatatgtggatgaatgtatgttatacattataaaaatgataggtgtatatgtttaaataatgtgaagatggtaattttatattgcttgcatgctaagttctaaaaataaaactaaattacaaatgatatatcatgtttgtatgagatctaaaatactgtagataataattgctagtggatgatgatgtagcatactttatgttgagctttacgaattagtgggtactaactatatatatatgttttcctgatgtaacaaaagggaattgatagatcttagtcacgtaaaatttatatattgctatgtctagagttataatatgtgcaatatgttgttttagttcattttaactgcaatttcattgtttttcttattatatatggtttacctttttttataagtctgaatatttttgcatctaattttataaaataattatggatggtaaatttactttatgtgtagcttagagtaatccgttgtcatccttttacctagctaagaatgcggcaactttattttggataaggaatagtgagagatatgaaaaccattaaattaattgctatcaggaaaaaatgactgttttcttataaaaaaataattaccttaaatatagtatgtagatactttctagttaattcattcatttctatcctcgaataattataagaaatctaaatctgttcggtgatccaggacttaagagaacacaaccatagtgaaatttaaaagaaaactagcccctatgggtttcgcaacgtcccacccaaaggactactagtgttccgcctaaaacatagaggttctcctagatatcgaggtcttaaaatttgtaagtttctgtttattttaaccatatataagcttattacatataattttacaattttttttgtatgttatcataatttattgttgaatcattggaaagcgataagtgatataatagttatgagaaacattgtctatcatccaagggataataaaagtgaccataatttttaaaacttaagtagaattgtggagcagcctaatctcatctccatttttaaaatcttaagtagaattgtagagcgggaactagctcaactttctgtttttaaggtgaagctcagaccgtttggtagggctataggtatacctctccattaacttattataaagttaaaaacatatttaaaatagtattacaaaatattcatgcatagatttttttttaaaaaaaaaactacgccgttttgtagttcagaaagtggatgtgatagagttcggtggtacgtacgtactcttcgtgacagtaaatataatgatatatcatattccggaagagtgtgaccaatcaccaatggcaacttatggatcatatcatctagctacaactcgtttatatatatacaaatcatcctacagcgatttctcttttggacgcagacgccgacgcaacggcgcatgcaagccagttgccgagttgtcgtccaccagtttctggtcgactgttgtaacccgatcttggtcgcgcgcagctgctagctggtgcacgcgagacggacgcgcgcgcgcgcgcgcccacgtcgtcttcacgggggccgccggtcacgcgaccccgtcgcgattgcgatggaggccggcgacccatcacccgtgcctagctagctaattagctcccgttcatttcgtagggccgctgcacaggtgatccgtcgtactgtcgtggcggagcgcgacgtgacggtgctcttatgattactgccttggccagccggggtcccaaatactatagttcctccgtttcatattatggccccgtttggaagcagatcctctgacttaactgtgactcaactgcacagcagttaagtcagaggatccctttctgctctgtttagttccccaaaaatttttcccaaaaatatcacatcgaattttttggatgtatgtatagagcattaaatatagattaaaagagaaactagttacacagttaagggggaaatcgcgagacgaatcttctgagcctaattagtccatgattagccataagtgctacagtaacccatatgtgctaatgacggattaattaggctcaaaagattcgtctcgcggtttccatgcgagttatgaaattagttttttcatttgtgtccgaaaaccccttccgacattcggtcaaacatccaatgtgacacccaaaaattttcatttcgcaaactaaacatgccctatatcatgtcctccgtttatattacaagatgctttaattttattagttaaatttgaatagattgggtcgaatttatgaaaatatattattccaatttttttatgaaaatatatagcaacttctacaacactaaattagtcacattaaatctaacattaaatatagtttaatagtatattggtatggtttgaaattttttcatataaacttagttaaacttagataaatttaatttaggaaaaaaaagttaaagcatcttataatatgaaaagaagaagtatgttagtagtacataatacatggtactcctagacgcgtaacctactagtacgattaaaagccatgacaacaaggatgaaggtaagaagtagctcgattgagatcctctacttaagtcaagtgacttaacagtcactaacatgtgggtccatagcaaagaaggcccacatgtcagtaactcagaggatctcaatccgtagcatgagtaggagcaaaatatctactaccacgtagaaagattaaaaaagtaaaaattgtaaggtagtcatttgcccccagatagtataaaattaactgaggtttaagatctctgcttaggaggggtttggatgggataaaatttttagcccctgtcacatcgaatgtttagacaataattagaagtattgaacgtagactattgataaaacacattccataaccctggactaatttgtgagataaacctattgagcctaattaattcataattaacccatgtgatgctacaataaacatgtgctaattatggattaattaggcttaaaaaatatgtcacgcgaattagctcttatttatgtaatttgttttataaatagtctatgtttaatactctaaattagtatctaaatatccgatgtggctgggactaaagttaacacccctaactatactctagatatgtctctgtatgacagctgctaagctagaatattttgaggtttcctataaggtagtacgtatttatgttatgaaaaaattaatttgtgaaagatcaaaaccccaaagtatgcaggagacttgttctgaatattattctgccctctattattgtgtcggtcgggcacaattcgagtatatttggcaacttgcacatctacagttctacactgatcattctcccgagactgttgcaaaagatactgttccatgagctccccactgcagcacaacggcaaaacccctataatattgccgctacatttatcattgtatcccaaacttcttaaaataccgaacccaaccattgcttaaaagctcgtaccgtacttttatgtttacgagctaaagttctagcgcatgaaagtcgaagtatatactttagtcgatacaaagtcttctttttttgaagatctactgtgataatgaaaaagatttctacatatccgaccaaacattccctatgtcatacgtcaagaatgattgaaccacttagacatcaccacttgcaccttatttttctttcttttttttttagaaacagactaccgtcactctaaactctaaagtactatggttgattttcctaaaaccttgaatatagaaatggcccggatattgtaccctctaaatatgaaattaaaacaggtccaaataatctagtaagatgtatgcccaataaaccatgatgagcagtgagagagtcgacggcattgtcaaaccagggccggcgttatagtggtcgaccacttctttaagatatcaacgttagtcgtcattgaaatcgaagtgacgaagctcggcgaccgtccaacctgtccgtacggtggttttgccgctaatgacgaggatggtgatatatatacatcaaattagctaagtacattttgattagtgggacggtttgaaaaagaaaaagaacatacgctagcagttggtccggagatcgtcagtaggaaacagaaatgacgaagggagtgcttcggccaacaacagtttttgccatataaacaaatagtgacattatcattcattcatatcgtagaagtgcttacggaaaataactaattagggttcatcagaaccggtttctatatttctagggaataaacactaactatattttgaggacaactttttgtatgtacacgtttttatttttcttttccggacgaatgcactgaacctaccggagtgccggtgagcccagtataggccagggcacgtttgttcgggcgatccccaaaaccggcgcgaccaaggaaagcagagcgcactcacggccgggcaggagacatattggtccttgcggcgcgacaagttgaacgggcgccggccgatcagtgcgcaccgtcaccatgcatgcattgatgcatgtacaccagcgaggcaatgagatgggtccagaaaagtcaagtggagatcgcagcgatgggtggatataggagttcttccggcccctacatgatggagaaagcagagatgaggaagaagggacatgatcagagatgaacaggaacgacaggacaatcaaccaatcgttgggactggggtctcggggtccagtccagcaacagcaaaaaagagtaattggttccattgatgcaagtaattaagcatcatgtaatgcttgtgtactgactgaaatgagatctgtttaagcctcaagagttttcaactgaattttactggaagatatcaattagtttaagaaaaaaatacactggataaccaaaaaataatttggtatcaaataatcaacaagaaagcgtgtgcctgtttggtgttaaatctcatgcaacctcatggtatcagttggtacatctatagatattagcagttcgtagggctccgtttttctctgttttttcaatattttttttgctcttctctttaggcgacacatgtttttctagtatacaggactcctcgagtgggaatcggcaaaaatgtcctccagtttatttgtaattcacgtatcgcaaacatgctgttgtgtttcttacggaaaacccttcgtgtttcagacaagtacaacgctaagatgagaaaatttcgcttttaggggtagcgctgtaaacataaaaaatacgaatttttttttttcgaaaaacagccacatagatatgcttatccaaaccctatccggtcgcctcccacctcgcccacacttcgccggggctccacatctcctctcctcccacagtcggcggtcctgcctctccccatccggcggcctcgagcttgagctcctcttcctcttctctcctccgatggctggcggcctcacctctccccccatccggcggtcctctcctcggtggagcctcgaatcggacaacgtcgaccagatcgacacgacaaggaggttgaggcagatgtggatcgaggcggccttcgtcgggccaccactgcggacgggtcgaggtggccgtcgtcgagctgctactgcacaggttgacaacgacgatgagcgacggcttgtaaatacatagtacaatatgtacatgagcaatccaggaggcgactccaccaggtctgaaccaccttcctagctcaccaccttgccaccatcggcaacgtcacccacccacttccgatgcctgccctctcctctcctctcacattctttttctttctctctctgcctaatacagatatttttcttctatgaattcaattcatattttctcgatccataaacactgacggcaagagcgagccatcacagacgacactcttgctccatgtgggcatcggttggtgcctagagagctgatttgataggatgaggttggtcggtttgttttgaacgtggactaatcaacgtgaagcagggaagcctttagaggaggttggcttgttcggtttagtaggtggttatagaggtggtattggccggacacaatgtacggttttttcctaacaaactaagcactgtatgttttttttgcataatgtatggtttgatattttttttcttaaaatgttatatcttctttaatataataaattgccacaccctttttaaaaaacctgatatgtgtccataggacctagccatgtgaagtctacatttgacaaatcaaattgatcaggtctgggccaggtgtactatgcccaaaattctgtcatcatcaaatccaaaaagcaaggaacagtctcttatcgatctgtagttctctacttaatagagttgatcacttaggttaggtatatagaatagtaaccaccactaccattatagtattacactatagtactactacatcacaaaggcattagacattaattaggagtaagagcaaatcttgtggagaacctttttgtgactgtgtcgggtaaccggcatgaactcaacctgcggcgtgcacaggacacagtgtgatcagatcagataatcagattagcagcttagcttagcttagcttgcttacgtccacactactttactctccgttggaccaaatcactaaactttgtcgtaaactcgtactacctccgtgccataataagtgtagccataagtttccgcgtccaactttgatcgtccgtcttatttgaaacttttttataattagtatttttgttgttatgagatgataaaacatgaatagtactttactcgtgacttatgtttttaatttttttaaaaaaattttcaaataagacgaacggttaaagttagatgcggaaaaccatggctgcacttattttgagatgtaggaagtaaggcataccgcacaccacgtcctgggggtcaggcagtcagcctagtgaaaaagataactgtgcaagctagcttctcgctctcgcgcctataaattgggcgctcgccgccggcctcagagtgcacacacagacacacagacgcactcacacactcagcttaagcgagcgagcgagtgaacgagagagagagacagagatggcgagtgttgcctccttcccggtgatcaacatggagaacctggagaccgaggagaggggcgcagcaatggaggtcatccgcgacgcctgcgagaactggggcttcttcgaggtgcatatgcatgccaagcactagcatgtactaaccagcaaaaaaatgttaatatgattctagctaattcctaagtggccgcacaacttattgatatgtttcgatttttttttgttcatcgagccacctatacgtacatcgttctttctggccgaaaggatggaaacatattcttattctccatcttagtcagtcgacccaccaattcaatcttatcatctcagtaggctcgccggctagaacgcctactaattagctttgatttgtcatgcttgtcaaagtattaactttgcatgtcgaaattaacatgtgtgaatgcagatgctgaaccatggcatcgcgcacgagctgatggacgaggtggagcgggtgagcaaggcgcactacgccaactgccgggaggagaagttcaaggagttcgcgcggcggatgctggaggccggcgagaagggcgccgacgtgaagggcatcgactgggagagcaccttcttcgtccgccaccgccccgtctccaacctcgccgacctccccgacgtcgacgaccactacaggtatacttaccctgcatgcatgcgtcatcatcaatcatcattaacaaactcaatttagtctttgttaatttatctgcatgcttctgaaagaaaagcttaagttgcaaactcgcctaaatgatcgtcagtattttaatcggaagtagtacactcacaaagcaaaggcttacaaagtatcctagctactgtagagtgtaggcctgaccaaaacctcaacaaagttacacctgacacgacgcgctctactatagaaatgcccacttctgtaaacagctactgcaaccaaaggtgacaggattatcgaccaaaaggagatgcttacttttttactgcggcttatccacagcgtcgattactcttgaacggacgtagtggcgcatctctgcaccctttcctactatgagatagtaacaagtgtaggaatacaccattttttttctgttttcccccggagaggagtatacatcatacaacgtgcagtaactatcaatcaatcagaactcacactaactggattcgcttttggcaaatggcaagtgacttgtgaatattcgcgaggcctaacagaagcccatgtgtcgcgtttgtgtaggcaggtgatgaagcaatttgcgtcggagatcgagaagctctcggagagggtgctggacctgctgtgcgagaatctgggcctggagaagggttacctgaagaaggccttcgccgggtcgaacggcccaacgttcggcaccaaggtgagcagctacccgccgtgcccgcgccccgatctcgtcgacggcctccgcgcccacaccgacgccggtggcatcatcctgctgttccaggacgaccaggtgagcggcctccagctgctcaaggacggggagtgggtggacgtgccgcccatgcgccacgccatcgtcgccaacatcggcgaccagctggaggtgatcaccaacggcaggtacaagagcgtcatgcaccgcgtcctcacgcgccccgacggcaaccgcatgtccatcgcctccttctacaaccccggcgccgacgccgtcatcttcccggcgcccgcgctcgccgccgccgacgcggcggcggccgcctacccgaggttcgtgttcgaggactacatgaacctgtacgtgcgccacaagttcgaggccaaggagccacgcttcgaggccatgaagtccgccgccgaggtcgtccacgcggcgcccatcgccaccgcttgataaggatcagacttcactagctacggctgcgcgtgccatgatccagatatatgggatgtgtacggtagtgtacgtggtgctgtacatgccgtcccgtgtttttctgcgtaatgtttttacgtactagactactactagtgtgtgtacgtaacctggggatgtaagtatcgcgtcaagtactcaagtgtgtgtaacgggcgctctaatcgtattgttctgtgcttcaatggctaccacgttagatgggccttgtgctaatgttgttttatgctacttccgctgtcgccttagatgggccttgttgtataatgtctcgtcgacacatctgtgcttttctgggtgtgtttagttggggaaaatgaaattcttggctgtcacatcgaacgtttgatcgaatatcggaaggggtttttggacacgaatgaaaaaactaatttcagaactcacctggaaaccgcgagacgaattttttgagactaattaagccgtcattagcacatgtaggttacagtagcacttatggctaatcatgaactaattaggcttaaaagattcatctcgcgatttcccccataactgtgcaattaatttttctttttatctatactagcatgggggcccgcgcagattgtgcggctagcatcattatattttctctcatataatagcacatatgttttctcattatattattaaaatatattacaatgacaacataattttaaattttgcaataacttttcaaaactactaatgtgtaataactactctagtctcctcttctaatattccttattttttaattctgaatttcagctatttctagattgtatttttatatggactctgctttttcttgttctctgattaatgtgagaatttctaggccatgagagcgaacatggaggctcctttttattctgaattttagttggatttaaattccaatatgaactctatactctacttctaatattccttattttttaattccaaatttctattttttttcttaattgtatttctatatggactctatagtctacttctaatatttcttatttttaattctgaatttcggttattttctaattgtatttctatatggactccatactctacctctaatattccttatttttaattccgaatttcaattatttcctaattatatttttatatagactctagtctcctcttctaacattccttattttttaattccaaatttcaactatttcttaattgtatttctatatggactctagtctcctcttctaatatttcttattttttaattccaaattttaactatttcttaattgtatttctatatggactctagtctcctcttctaatatttcttattttttaattccgaatttcagctatttctaaattgtatttctatatggactctagtctcctcttctagtattccttattttttaattccgaatttcagctatttctaaattgtatttctatatgtactatgccttttccttttctccgattaatgtgagaatttctaggccacgagagcgaacgtggaggctcctttttctattcctttaattatataactagctgggtggcccgcgcaattgcgcggctagcacccacaaaattatctaatttttcacatgattctacttaaaatttattaaatatctatctcgttgttttatgactttcaaagatcgaacattatcatccccgggtttataattttataatttttaaaagtcacacctgttgctacccttactcctttgtaacccctttatttgttgcgcggctagcacccatccaggattatatatttttaagcatggttttatttaaatttgttaaatagccatctagccgatcttaaaagattgaatcttattatcatcgggttagtttttaaaagtcaataagtcgtcaccccttacttttttacctctcatttatttgattgcccgacctgtcataacttttattcatcctctttgaaactttcatatttagatcttatagttttttaattcattgtcttgtcgattgacatatttatatttttagaagttacatcaaatgtcatcattgtactgttctacaatccacccgatgtctcctcttagttgtcattggaatttaaaaagtcaaatatgatattatgattatcgttgtttttttttctttttagaagtccattcaaacgtcacgactgcgctccttgatggcttgcccgctgctgtttctcttaatcgtcattgagatttttaaaattgaatctaatcgtcatttatatttttattgttttaaaatgtcccatcaaccgctacaccctatttatttatttacggctcacccgttatccctccctctttattgttatttaccattgttgtgttacgggttgttcttttaatacttttttttttgttttgaacttttgttattcataaatcgtattctttcttaaacttttgtttttatttttctaatttcataatttttaaaaaaaattaattaatcacatgttgtgttgtagatggttttttcttttcatagtcttcattattattattatttcaaaattagttacttataaaacatctgaattgctggttgtatatttggtgattaaaaaggatcgaatagataaagaggcagtcgcttcatttttactggcaacaaatatatcacagtatgttctaaatagttttgaagtgattagactgaaaaaataatacttacatgtgcacacgtatatacacggctttctgcctacctagttcctgttttgctttttttttccactggaatcaaataggtttagataacagttttagaattggatctcgattattccatcgagcaaggcgctttgtacacctgtattagcactacaactctaattcctatatttatatataggtgttatatctcaaccgttaaattatgaacgttaaattatgaatccactataatctaaacgtttaatctgactgtcagtttatagcggcttgcactaactcatctcctgtgaaaaatatacactaattacaatatgttgatatcatttgtactttcataaacatcaaagaaacttttggtgtttgatgcattgccggctgcaagtattgatctgtttgttgtaatgtctatgtaaatatcatgtctttttactatggttggctcccgctatcattgggttctgccgctccagcccaatcgttgatgcttgaaatctacagaatatataggtgcagcagtgcaagctttgtttatttggcagcacaactcttctccgtataggtttgtaattgaattagattatacgtgtattgtgtacaccgccaaagaaatagaaaaggacaaagactcctagtatgtaacgtagtacagatctatagacttatcttttctactgtaaacagttaaaatctagaattaccaaaggttttaattaatctcgtattgggttcttatatggactcctatttcagtattgcttatttttaattccgaatttcagttattttttagtttgtatttctatttggactcttcttttctttttcttcgattaatgtaggaatttttagcttccacagcgaacgtggtggcttcttttcgagctgttttaataatataatagatagatttatgcttcatgcatgtgttcaaagatcgatgtgatgtttttggaaaaaaaattgataactaaacgggccctctttcggccgagcatgttaagctccgggcctcgctaaagacgatttgtaccgcctacgcgatgctacgagacaacgaaccaaaggtacaaaacgaatccaccacgggagtacgagtcacaaaaaactgtatcctctgcatgcatatcagcgtgtggccctccagccggcggggcacggattttcacggggaaccaccgatgaaacccccgatattctcccgtctcctcctccattcggtggtccagctcaacctcgcctgccggctccgcttggcagcttccctcacatgcgcgcgcacgcgggtcgcgggggaggcagccaggcgaggcagagatcggttttgtaccgaagggaggccacgtcccgcgaaggcgaagctccatgtgatccggactcccggaggccgcagccgtggccgtgcacgacatcacgacgcccacaaccccggccggtacgtcgcgtggttggctggttgccgaaaggcctcgagacaacgtgtgccgtggtcgggtggggagccggtggcaacgcgagccttttctagttagatcagcgtcgtacgtcgcaagtgcgtgtcaacgcgacattttagattagctggtcacaaacactagtggtgatctggtgattgtcgtgagaagttgggatcaacggcctgtcaactttgtgagtgggcctgatcaggaaatactactgtaaaaagggacgttactatgtggatctttccagagcagtttggcacgaaatttctccttgtaaaggagaagtacgcagaaatcccaacgacggatttcaaaccaacctactactaactgatttttaacaaactcacggacgttcacaaaagcgtagcctgaaagcgaaacaattgcaaagcacgagacgagacgagggcacaacgctatcatgggtttgaaactctaatgccggtcgaattggcttcaaagcaaagcaccatttccggtataaatccaccagacgatggaggaggaagagtcaaaccaggcaacaaggccctcgagacaagccatagtgggtcactcacatggccaaccaatggctagtacaaatcagtctataatagtagtgatttaggttaatcatatagtaatactccatactccagcgtagttacatggactaaacaaagatatcccccaccattagccaaagctgcaaaaagaaagaggtacagctactacagtaatctgtttctacgccgcagcaaacatgcagcaggagtcaagcagcgggcacagcaccacaggtaaagaaagggaggaaaactggaaaagaaaagcaaagattccaacatctctgcctcttttccctccttcctctgtccggcgttcgattttctttcataaatcctcgcatcccgagatggctgctgccgctgctcttcttcagtctttcgctactgttgcttcggttcagaccgtcgacgggagctcacacttgcccatctctgcaaacaatggaatagacaatcacccagtaagatcacggttcaaaaagaaagaatcatacaacagggtggtattacgcgattaaaaaactggtaaatcgctgctatcatgtgaacaagagaccaattgtagtgctggtccaaaggaggagacgcgtatactggcggtaaccgagggaataacaagtggaggaatactgtaaaaaaattgatgcaggtagtaggagtacgaactgcaaaaggtacacgacacgatagtggcaatcagtcacacgttgcgagcctgcgacatccagccacggcacgcatcaccatgaatgaagggagtaaagaatacaggacgagtcatatcacgtcgagctgcgagccacgctgaccccatctcatcgcagtcataattgcacttgtgcgggtttacaacttgctgagccactcattaactaccgcagtgcaatgcagaagaagcagaacacctacagctcgaatccaatgcaacgagacctcaaaaccgcagtgaagatttgttggtcacagagacacagtagcggctgcttgcagtcgcaattttgcaagttgcaaccgccggctgcgtctttccaaggtgtgtttaacccaggcaggaagccatgggtgtgaatcgtgtggcacatgccagtgtgtggctgcgaagactacagtgaagcgagaatcattcccgtacgatgccgatgcaaagcgcctttcatttgcacccgtactgtgacccacccatctgtgaatcaccatgtacaagtagtagtagttcctacgcaaacttttaccggaacacgatggcccaatccaggttgtgtaacgtgtactagcgtgtaccaagccctacacccgttcgtataacacgtacatttcgctacgaaacgcaaggaatcatgtagaagtagtacgaatgcaatgaggtaattgtacgagcaaacgagcgcgaagactactcacttggcgcttggttgacgacgtaggcggcgccggcgaagtcgcaggtgccaatggtgcggccctttcgctggtagtagtcgttgaaggcgtaggaggcgtgggcgaccatggtgttcggctcgaagcacgccgcgccgggctggatggccttgcagtccgcgccgcccggcccgcacgcgtagtccagcgccttctgcagccgctcctccccggccatggcgttcgccacgcaccacgcctcaccggtcgacgtcgccttcacgccgccgcctgcgccggccggcgcattgccggcgtttaccccgccgttgtcctgccagccgagcccgccgttgtccttgccgctgctgccgccgccgccagcggagttgccgccgaggacgaactcgacgtcgtagaccttctgctggttcgggtagaacacgccgtagttgcgctcggaggtcggtccgggcttctggttctcgttgaagagagcgaagaggtacacgtccatgtcggcgtcggggcggcgcggcgttccggcgttgccggagaggacgcggcgcaccaggttgccgttgtaggccgcggcgttggccgccgcggcgccggtctccttggcgtcacccttggacggccacccggtctccgacaccacgacgcgcacggcattgtagttcccaagcttgctcaccgcggtgaacacggcgtcgagctgggcgtcgaggaggctgtagtacttgaggccgctcccggagtcgagcacgccggcgttggggcggaacagcgcgtagtcgagggagatgacgtcggcattgccagagtacgcgaagaacgggtacgcgttcaccatgaggtacgagccggtctgcgcgaggaagtcgagcatgggcttcatgaccgcctgggcgaggtcctcccggaacacgccggccgacggcgggtacgagccggcgagcgcggtgagcgcgatgggggacgacaccttgacgggcttgtcaaggctgagcctcgccagcgcggcgtgcacgttggtcatcgccgggacgagctgcgccgtgaggttcttggccgaggcgaacacctcgttcccgacggcgatgccctggatctgcgtggccgggtagtacgctgcgacgttgcggcgcacccaggcgagcgcgtacgacgggcgcgacgccgcggcgagcagctgctcgttgggcagcgcgaccaccaccttgatgccggtgttggccagcgcccgcagcacggtcggctcggtgtcgtacagcttcacctgcgcgatgccctgctgcttcatcagctgcaccaccgccgccgggttgggcaggtcgttcgccaccctcccatagttgatccccaccgtgcccgcctctgtaaccaaaccaacccaacaatcaaccacactactctccactaaaccacctgcattgccaaatctctcgttacctgaagcggacaggaagagcagcggcaatgcgacggcgaggatgagggcgcggaggcgcccgggtagagccattttgctgctcttgctgctgctcactgctgcgcgggcgcgagaggcagcagagcaagacggcgacgagtcgtgtagtggagagcgtggtgagtggtggagagggggggaaaagggcggggatttatggttgggggaggtgaggcgctgtaaagtgggccagccgcacgcgggcgggttggttttgggtggggaggaaatggcggggatgttgggagatgcacgtcgcgctcgcgtcgggttcgtggcgaagtgggtggtgcggccgtgcgagcgagggagagcgaccggcgcgccggatgaccgttgtctccgcctgcgcggcgggggcccaacgaacgtacggagcgcttgggctggctcggggttaagtggttagttgctggctaatcaatgtcgatgaatgagactgtacttgtagttaagcgtgacctaattgctctcatcccaacggctccaaacttgttcctttctcggacgatttaatttcctgagctgaaattgttggacgattttcctgagctgaaaatgaaccgaaatgtgggtgtggtagtttctggcatgtgggaccaaaatcattctgggctttgcaatatttatcggtgttcggtgaacatgctccacatagactgtggccctgtttagatgggactaaactttttaagtccctatcacatcggatgtttgaacactaattataaatattaaacgtagactattaataaaatccatccataatcttggactaattcacgagacgaatctattgagcctaattaatccatgattagtctatgtgatgctacagtaaacattctctaattatggattaattaaacataaaaaatttgtctcgcaaattagctttcatttattgaattagttttgtaagtaatttatatttaatactctaaattagtgtctaaatatatggactaaagttaagtccctggatccaaacaccacctgtgactacaataagttaaaaaaaacacctttttaatgaaaaaaaattctttattgactggactactggattgagtgttacaaaatgtaaacttcaacgacgtgatataccctacttttgttagcatgtaaaccgaaacaaaatggtgactgagcattaatcaaacgtgctatacgcgcgactgttttcagctacacttagaccaaataattgtcgataacaaacctgtacttttgtagccttgttcccctcaaatctctcatccaagtgactaggtggacgatgcatacacgcaagggaacgcttgtagcatgacgccgacagcgtgccccggtctctccagttttctgctttcgcaacatgcaattgcatggtcctctccttggaggacgtaacaaactctgccgacctgaattgcttggtcagtaaagtctctcggccacacaggcgatgaggcgagcaacgcatgactgcacacaaaggcagccaggtacactagctaccacaggatctttttggagcggatgaccagtgtccagtgcgagacagcactagtgtaccaactcatccgttgcatttgcacatttgcactgcagttgaacgctttagctcggtttggtactttggtgacgttggttcattaattagctgtaaccgtgtttgctgtgattagatgagctaggacagtcccaacccataacactagatatggtttttataaactccacattatcaagaaactaatactagacactactcttacaatgcaaacaccactatttcatactttaatttaatgctacttatctcacataatgtcttggatgttgtgtaggaaccatgtctcatgcaagacatgttttccttctcttttctcattttattcacttgccatattatttttttgtcctagatagcaacttatttaatgctatgaacaccattctagttattggggtggaaatgcccttattaattgattgattgatggctagatctgaaggtagccgaaatggttagaggtaaattatgcaagaaatggacaggaggacaggttagcctttttcaagcttcaccttcggttaattatgtttgaggtccggacaagaatacacatggggatcgagtggggaaaaaggcctggacgccttttaagccgctaataacaacggacagccgcgcatgctggttagagtaggtagagtcgagctagcgtgctcatgctcgagacgaagacatactgcaactactactactcgatggatggaagcagcatgtcctcgctaggtccaaactacagtgtttgccccagctcacattgcagcagaagacgagaagaccagtaataacagtagtcagtagatgtgctgcggcacagctattgttgagctcgacacgattaggaaaattcctcagggcgtgtactcacggtcttctccgtgatcgtcgtagatcggtcagtacatctgtcacgcatggtgtcgtcgattcgtcgttcttgctcgctcagctgttccacacttcacatgtagcgttctcccctagattagccagccagtttctggcaaacaaccaattcgatcgtgcaggcacagttgcagatgaagtggacgtggtgatgaacagaggagagcagatcgagcgagcgagcgatcaagtggtaaacggatagaaatccagcaggaaaacgcatcagggcccgcgcggcgagaaatgatgggggaagactggtggtaaaggggacgtacatcccagctgtgcaacggggggaaaagcggcctctgctgcgtccggcttgtcctccaccggggcgcgccatgtgcgccgtaacgcccgttgctccccggccgcggcgcgcggcgtccaccgctcgtctccacccgtctcactgcctcactctctcgtcggtggccacagtagtaaacacacaggcttgactcactggctgccaaagtgccaatgctcccgaatgtggcccaacagacagaggattaattaattatttgccactcttacggatggtgataaataatctgcccctagacccatatgtgatagacgcataagggcccacatgtcatagagacataaggacccatatatcatagacagcaagtgacaaataattaattgccacatcttaaacgtggcccaatgctaaatgtcctagagacataggcctggtttagttatcaaccttttctttaaactctttatttttccctcatatcaaaactttcctacacacataaactttcaactttttcatcacattgtttcaatttcaatcaaactttcaattttaacgtcaactgaacacacccagaaagacacaggatttttctgcttccgatacctgacataagagatcgtgccatcgcgataatgcaaaggagaggagaggcagtagtaggcctttggatctgcactagtaccattttcaggttagtttttttattttttgtcaagaattttcaggttagttgtgttcatgttccctactagcagcttcgttctcgcttcgaccatgtggcaagggtggcactgcaatcttctctcctataatagcagtagtagattccagaccggcagaagcttgcattcaaagcaggctgattaatctggttcagatagagaattatcgctcctgcgcatgcatgggatcctgcatcattgcacgaaggtttttatcattagcattaatatttttctctctgcctcttgagaaccactgagtggccattgctgcagacgagagtagcatggtgatctgatgaactcccacgctatgatcagtgtcagccatgtggatcttggagcatcatgcatccgagtcccagaggcatttctgtcggtgtggctggggaattcactcatcgcacgaaagattaggccgggaagggcagaatgatgaacatgcttggctaccctacgtcactggacgtcatccctggaccaccatgaaccggttcatgattggggcttggatttgtactgcacctgcagctcgggcagcagtagacagtagtgcggcgacaacagccaaaggccaagactgggaaaccacagagtgcgctcatgtgaaccaaacgtttattttcacactgattgcagtgagccagtgagctatagctcactcatggaccattcatatcacatactccctccgccctaaaaaaaaaagacaaaccctggttttcatgctcaacatttgaccgtccatcttatttaaaaaaattatgaaaaaaattaaaaagataagttacgcataaaatattaatcatgttttatcatctaacaacaataaaaatacgaactataaaaaatttcatataagacgaacagttaaatttagacacggaaacccagtgtttgtctttttttagacggagggagtaatctctgagctgcctactttagatcacggcgcttcaaaagagtcaatagattcagacggaagaggacatcaaatacatccgatatgatactattgatactgctgctgattcagtgcccaccttcagagttcagaacaatttcacggccacaaatggcagtaacgtttatttcacgttaaaactgaaagtttggttaaaattagaatgatgtaatggaaaagttagaagtttgtgtatatagaaaagttttaatgtaatggaaaagttggaatttagaagaaaaaatttggaactaaactcggccttagtattatccgtctcaggccaagtttagttccaaactatttcttcaaacttctaacttttccatcacatcaaaactttcctacatacataaacttttaacttttacgtcacatcgtttcaatttcaactaaatttctaattttggagtaaactaaacacacccccagtggtgacactggttctgcaatttgttttccttatcttctttttttgctccatttcaccgttcggctaggatggggaatcaagcctggatcttgcactattgcacacatggaccggttcaccaaccccacgtgccgttggtgacgcggcagggtgaattgcatgctactagtatgctacaccacctccatgtgcagcagcaggaaatgacaacggcgaagaatagatgagatctgatgaaagagaggtgaatataaaaaggtgaccctggctgaagaattcggttttaaaacgtcttgctacatcagattattctctcccttccaactgatgaggattgatctaagtttggaatgataaaactggaggacccaacaaacacatatgaggacccaccaaacgtatatatgctgaatttactgtgtagaggcccattagtattgactttcgattcctttgtgatgctggatgggaaaccgattatcaacgatgtttttaaaatgtgaaactgagtaccacacacagttaagacaaaagattggacaaccgtgttatggaaattgatgcttagctatttagctaatactcggatgtaattacaaaattgttgttcagaggaacatttcgggaggatatgcacaaacctactaggctgctatacaagccattagaatgaacaaacaacagattctgcgtatgtacaattgcggcgttttgtttcactacttgcccgctggtacagataggatacatgattaaagctatgtgatgaaacattcggtataaacctgtacatgactcttccaattccaagcaagttgttttgaaggtctgtccagtcgaccgggtatgcttctgtgttagtaaatgtttcctgttcacacttttttcagctcacgactggctatctctatttatcccgcgcataggctccctgaatgaggttgttacctggcaagtcaagttgccaggcccactgttatctcgtgtgagttttcctttgctacagaagtacatacaccagacatgtttatgtaaggagttgaaactataatatagacaagttagttgaaactataatatagaaaagttagttttgaactgttacttcatgttggactctctgtagaatatatgtggaatgcaaaagatgatataagcatgattttgataatccaagttacagcagttcgtgcagtgaaaagaaaagcagccatattcacagttatcaccacttgtgggttaaaatgcaatcatagtttcatacttgattctgtagacatttcgtagttcaacatagcttaacatctaggaaaaacaaccaagattgtaaagactactttgcacttttttagtgggaaaagcataggcacaaacagcaatgaagcataactcagattgtcataacagactgttatatgaactagtgatttcaattccaagggtcatttttacccctaaacttcatgaaaaaaaatcatgatagactgtaacttttttaaaaaagtaaggacttacaggatgattttgactagaatacctccgtgtgccttcacaagaggtggtatgctgtgcaccagttaaaacacgagataggcgtcggagaaatacttgaatgtggttgtaaatgctgcagcatgaagtagtagttaacacacagcacacatgaagtgataatgtaaactttgaaacactatataatcctgttatttattttgaaccactcgaccatgttactaaatcactaccagagtaccagtgaagttcacaacagaatgacatgttagatgaggcattaatcaggtaaaattctaattcgacagtcaatacgagatgttttctgtatatacctgatttcatatttaatgttcatgtgaccttgaaaatactaccacatacggatgagaaggaaggttacctaagccgatgcctgttgcatgttgaaaagaaggcaacaaaaccatacagaatgcttcgaatcgcacggaaaatctgaaaaagaaagtcaaagtaagttccatatatcctatttcctaatataattactggccgcatcaacatatttttgttacctggtacagaagatctttccatagtgacccccagatggtagtttcagatgcaagtccggtcgatccggatgcagaaccaacttgatataaggaactcaatgtagaccaggtctccctcagaactccaacaatgtccacaaaagagtctgccacaaaacttgctatcgcaacaacaagccggaaaggtgcagctagaatttctccaagaagccaaacgaaagggtacaggactgaatttgctgaagttaatacaaaagagaaagatatcagaatcaacacaaaaagtttatcatagtgaggtcaatacaaattgaagagcagagtagcagacatatcgtctcagaggttgcagaaaacataccaacattaagcacaacactgaagaccagccaaaaaggccatataatcatctgcattgtactgataactacactgcatgaagtctccatcgccaacatgataactgagctcagatgtcctactgtttcagcacaaaggttccatagcggcagggtaaattcaagaacctccaaaattggtcccatgattggctttgtcaaaacacttagagcagatttagtagcagttacaatcttaagagaccatgtaaaagcctgctggaagttatgtagaaaaagcatggttccaagatacttcagtcgtgaaatcatttcccacgtctctatccagtcaaagaaagggccaaacaatcttgatgcagttgccttcaacatggggacattcttgtagaggtcataaaatcctatgagaacagtaactattgacatcaagacatacaatgccctggcaagaggacacatccatgggcgatatgtcttgcagaacactggatatgactggagaaaaatgacccatgaaggaaggccatactctagcaatgttaacagcctcacatcagaaagtattacttcttttagtctgaaagggagatcgtggtcatcgaaccggaataagatcaacacatccttatatgtgctaggctcgagcagagtcttgccacaatcatcatcactgcagcacgaggaagatggagatgatgaatgtgttggtgaggtcacaacttcagaatatgattcttcagacatattatttccagcatcagatcttattatctttcttctcttgtaaggtccagagcaaggaggtggtgtgtatgaggagcttgtaaaacttgacgactctctcatgcattgactaggtccagaatcgtcatcatcactctgtacattctcactgtccccttcaggtgttgagaaataattctgagcgtcataaaacacatttcctgtacagcaagcatataagtggtctgcacatgcagcagagaagaatggagagcacattcatgcctttacctttaggagagatgctgttcaaataatcctgtaggagctggcattcagagtaatttccagaaaaccatgaagtgattaatgatgaagcttggttgacactctcaaattcccatctcttcattgttttagcttccactgccatagaagtatcagtctacaacaacataaaaacaaaataagcatgtaccatccattaatagctatgaatatcatgttcagtctaaaacaatacctgaagttcattgaaatagttcatgccgcgcacatcagcccagtctacctcaaaaattataaagccatataaggttcggtgcagttccttgttcagcaggcgagaatccttcagcctattcacatgaagctttttattccgcatggcatcatcaattaaggtataccatctggatgatggattccacaaatgagaaccatgtctaggatctttagagaatacaagtttcttcccagtttcatctccctttctcctagttctagtgtttgcaaaaggtgaaagtcttgactggagcaaaaaatgacaagaagtcaacaagtaagacgagccagaatcgatgtaacaagggcaatacatgaaagtgtaagcaatgaacaaatattcataagtactcgtttgtgtgcttacaagtggctcgtaaaacagtaaagcatacctttgtgaccatcaattgccacaggtgagcaggttttgtgtcctggtcttgcagccatggccggttatcaagcaatatgagaaacttcttcgtatgagggcacaaaaatatagtaagttcagcaagatatgattgtaaatccctgcatataataattatatcagactaactaactgtaatatagatgaaaatccaaatttacattgcactttaagatcatgaggttagtaaatgcaagcaaaactgtgaggagtaaaacaaaacttgcagtttgcaagaattcttaacacaattgcccacctcagaaattaagataattgcaatacaacttaaggtcatacgactttgcacaacaaatgcagtccaatggatgtacagaaaaaggataaaataaccgccacattgttcactgtttgatatcatatgatccaggtggacaatagcagatcaaaataaaattaatcaggaacacagtatttaacattttctttcctccagtgtacggacggagtcatgtattgcagcctactgaacctagaagtaaagtaaagccacaattccagatttccagtcgataaggtatgatgaatgtgcacaaaacacaaaattatcaacctacgataggcaactaaacctaggaataaaacctagattgttttgcaaacaacaacgtgatggtatagtaagtttgttttatcatctctgcatgaatatgtagggagaaatgacaaaccctgaattattgaaccgttccagtatagtatcgatcctgtgcctttacactggaaacatctactaccttaaattggaaagatttccaagaacagctttcctttctactcctactaactttagtcatatctctcatcaagatatacagtattctgtaacaaaataaatgctactagaatgaagcaatacaagacaattcagctacccactcccacaagtgagctttcctgtctttttctcataaacagtatgctggaacttcctccaccaagtaacacaaacgaataaacgactgttgtagttttgatcaatttccactgccctttgggaaacaagcgtaactaacttcaaccgtgttcatcgaagttatccagttaactttctcgtaacttctcgtttttttcacttatatcacaacgggactacattgcattgtggaccacacaaattagcacccaaattatacgagactggaacattccaccaaaagcaatgaaaagaacgtttccaccgcgagatcaaaacagagcccccgcacacagaaggagacttacccgatttgcaagctcgtaagggggaagaaatgccgcttcccgccgctctccatcacgccgactccaccacctccctgaaccacatacgcgaaaacacgcaaaaaattccacatcaaacgggagatcagaggccaccacaaaatccaggcaaaggcgcaagcaaaaatttgcagaggtatctcgtcgaatacctgcgcagaggtcagaggcatcccatggtgatgcctatccgcatgccaaggtggccagagttaatggccacccccggtggggtaaatacgccgcctacctccccctctccaccaccacgcggcgctcaatcaccaatggctcctcctcaaataccaccaccacgagcctccccccccccccaccctgcctcgcgctgctccggcgagaggcgcggctagctctccgccgctccgccgccggtgacgcggcgtggtggtggaggcggcgaccggatcgcggcggggccccgcgccacaagccaaccaaccatccgaacggccggtacgggggctttgcttccgaggtgagatgagacggttcggatatttatatcccgatgacatgtggagcccgagcacgagcagggcccacctgtcagcgtgcccggatttgttctccggaggcgggtgcggtcggcgtgggggtgacgttgatggcgcggactttcacgaaacccggggggtggctgacaggtgggcccggagattgtgtgctcccacaagccagcgtgccgcgtcatccgcttcgggcatttctggtttccccgcgtcgaagcaaaggggagacaaatactacgtgccggcctacccgacgccactggtatgcaagtgacgtgtggggcccactaagattggacccatatgtcggtgagatctgcagcatccgacgtggagtaaggcgagtgacccatatacgtaattatcgaaatccagagtggggcactcaggggatcaactgcggctgttcggtcacgcggcgatggtgtgcgaccgatgatatggtgacacgtggaccgtgctgcaatgatggcgtttactgcagcgatgacgtgtggtgtttcgtgttcggacaggtgcacggagggctctaggttctaggcgccacatgcaaaggaggaacggcgtccgcgtgacgcctcgagcaccgtgtaacgggtttattgcatgtgaaattattggcctgtacgcccagattgatcatagataaatcaatgatcgtggcctcctggagaaaacaagctggagctactccgttcagacaagatccaaggaactaaccgtggaaacatgaacggtctaattaaaagtactcccttattctagcatttctctcatattgatgttaataaatttaaacatatatatctatctaaattaattaacattattatgaatgtgaaaaatgttagaatcacttacattgtgaaacggatgaagtagtttagagcaagtttaatagtatagttcactattaactccaattcatctataatcaatctaatagccaattcatataatagttgctttctatactattaatatatggtcccacatgtcatatatacattgtgtcttggagtccgtgctgtagctggctacacatctgtagcccgctgctcttctctctcatcgtttatctcattaaaatatgtttatagctggctaatatccagctattgtacctgctcttatgggaaaaatataattttgtatgaaccaaatctaaaaaacagaccatgataaaaagaaaaggatttgatttatctcctcgattatcataaaagtattatctatccccttaaactagagtatcggaaatttgacaatccccgagctattaaatcaacacgaaccaaaaccgtaccccttcccatgcgtaaaaaaaagtggtagttttaatattacgttgcaaacatatgacatcgatttcattacatggcaacctaatcacgcattttattagttttcttaccctcttatctatctttcttactcgctcgatcaaatatagggccgtcgctgtctacgacctccttccctgttgtcctctttctgtttcctgccaccaccttggtctttccacttacttttttcgatcaatgaaagaaaggtaattcgagcgacgagagggccaaaagggagaaagggaaaacctcctaatgttgtttgaaggaggggagcaacaaagaacaacacgaccttgtggaggaccacgttccgagctggctaggagggaatgaaggggaagcccatctaccatttatggggatgggagtgacagaggatgcatagtggcgcaaattagtggaggacggtggcggacatgcttgtctaggaggggatgaaagggaagttcgttggtgctattttaaaggaggggagggcgagtgagaggatgactcgtaagctcatgaaggatggtggcgggcaagctcatatgggaggacaccgacagctcaagctcaaggagatcaaatcgtgtccgctcacctatgcatcaagtatgtcaaccttctcattcaccgaatcaagtgcttcaatgccaacctcaccatcccatccataagacacatcccctccatcattgtacggggacccaatgaggtgaaacttgagcgggtggtatagatctagagggcaaaacattgaaccgtcctcacaccacaacttcacatgctattatcaaggtccctccatggcttcacgctaccaaggagggaggctggagcgttgagaactagggcattgcctaggaaagtaggttggggcgtcgagaactaggacatcaccaaggaggggttggtgcgtcatggaagaaaaagaataacgagataggctggtaggtaggcataatgagctgatatttttgttgccatgattcatccagatttaatagttcggggtttaaaatatttaagagggtaaatcatacttgtaggggtaaacaaaaaggccctaaaatcaacaatgaaatcaagctttaacattctatgaaatttggcaataattgatatattaatgcttataattcatcaacccattaatacattgacttgtctggttgtagtatgtaaattgaactacatatttcatattttcgttccgtattggaccttagggtggtcatgatcgatctaccaacgttgccgtgataaaattatctatcaaccaattaatgtattgggtctttttgtcaactcaccatattgtagttcatataataacaactatatatataaattgctcaccgggtgtattgacgtgttgtgcaccagatagctgactagctgtgcgcctgcttccgttgtttgttcgaaaggcatatccggcgtgccgcttgcgacagcatcttccatctccacatcggcaacgaccagacgatgggtttgctttggaatcgccatcgcgttgcagcatgcaggccacatgggccaaggctcgaagcccaatcacatcttttcgttctttactttccgagaaggcccaaaataattttagcccgttgcggtctttactctttacgcatctgttctcgtgcgatcgtgcccaatccctcgatcctgtccacccagaatatgtctatttgacttctctaagctcttgctcgtgattaaatagcctccctcaacctaaaactgcatataacatctccctcatttttaaaactagtgtaaatcgacttattcaatggtttggaaaacgatttctgccgatgtggctggttgaccccagggctctgcagttgcgtcgccaccaacggggcgtgtaacatcgattacttatggtctccttggcgggatatgtgctgccgacctcaggagatagatggaaaggagaggagagaggaaaataaagagaggagagtggctgataggtgggtttaaccagctgattcagcgagtcaactataattaacatatcacgtctacaggaaccacttcctaaatcatcgaaagagtttgatttgtatcggtttttcaagatggggaagacattatattcagttttgctgttgagaggcgattcaatcaagaagagagataaagagagtcataatagacttattcctcccccgttttgcgcaccgacttcggcccggcccaacccagccagcacctctgccctcctcgagcctacggctacgaggcggttgctcgccgccccaataaataccccccgcctccccttccgagttccgagcaatcgatcgaaacgcttccccctcattctcgcacagcatcacacacgcggagtccgcgcagggagaccacgcgcgactaggcgctcgactctcggcggttgctccgcggcatcgcgcacccacgccgccacgactcgcgagagtagggtgcggaaccctagcctccgcaatgtcgcgcggcagccgcgaggaggaggatgaagaggaggtgtacgactcggaggaagaggaggaggaggagggggaggtggaggagaggggcggaaagcggtcacgcgggggcggcggcggcgggaagtggtccggcgtagagagcttcatcgacgacgcggccagtgaggatgaggatgaggaggaggaggaggatgacgacgaggactacgtgggtggcggcggcggccgtgcccgcaagaggaagagggcgtccatcctgatcgacgatatggctcaggtcgacgatgaagaggaggaggaggaggatggcgagttcgaggacggtgagtgcttcctggtggtctcactggtgtttgaactgtgaatccgtgatagaatcgttagattgatttcccaaatccgaaattacgaagcacagcgaaatcagcaatttcgtttcggtttctgctagctgagtcattggacgtagaatttgtgtttgttaattaagcgctaagttgagcgaaccaacaatttcaatgctagttccttcccggttaccctggataatcaactctgttcgaaatggtccaggtgtagattcattaaatttggtggtcaatttcgtattgattccatgttgttgcagttctatggttgtttgtggtggtttagtctcatctaatggcaataagaatcgagatttctgtttagcgatatgtgaaaacttcagttggaggcaaaagtttatattcattccgggatttttgtcataaattgggcagatttgctaggacaaaagtagttccgtcaaactaactcgacaccaattaggccttcaccaaccaagaagttaactgggcgagtgggcgtagttcattcaatcatctctatttaaagccacgttgccttgaatggcaggactctgcgacatgccaatatgatggactgaatttgctgctactacctattatcaatgttcaaagttgtctgaatacgctgatggcctgatggctgttctatgttattgtgatagatctgttaaaaaatcttcgtttcaaatgtgaaacctaattggaagatgctcctactctttgtttcgaatgcggcacagggaagatgctccaattaattcataaactaactaagctgtttacttgtgctgactactaacatgtgttaccttccttttggtattatcagattcacattgtcaaaatatatcttgtgttgaattatataatatccaaaagcaagttcaagtgttttaatgctgtcagctatggtccttcatgttttggtaggctttattgatgatactcgagctgacgaccctgaccaagatgtgggaagaagctctagacggcatccatcttctatgctggatgaagaggaggacgtggatgcacttgtgaagctaatacacgacaggtatataattccgtcatcacattttgtggatgatgacgatggtgtgactgaggttgaacagcaagctcttctgccatcggtgaaggatccaaagctttggatggtgaaatgtgcggtatgttgcaggttctatcgaataatgttctgctccacaatttgttttctgtataatttgatgctcactgatatccaattatgattttcagattgggcatgaacgggagacagccatttgtttgatgcagaagtccattgatacgccagatctccagattaaatctgttcttgcattagatcacctgaagaattacatttatgtggaagcatataaagaagcccatgtcaaagaggtacggtgcttgacctgacattgtaatattcctgctatgtgatgggaactaaaatttattacaggcttgcaaaggtgtgcgcaatatcttcgcttcaagaaaagtaactctggtgcctataagagaggtggctgatgtactctctgttcagagcaagtctactgatatttcaattaacacatgggtccgaatgaagcttggtgcatataaaggggatcttgccaaggtatggccatcaccacggcagtacagtttcttcatgctaacattttctgctactatttgattttatgacctccatcaggttgttgacgttgatgatgtgcatcaaaaggttactgtgaaactcattccaagaatagatttacaagccttggcaaacaaatttgtaagttgttacttggtataaattgccacgttttatgttcacctttcagcctaacatgccctgttatatttgtggtgatgcatctgctgttaatacattacctttttaggttgttgctgccatcatttggtatgatgttaggatttcctatctgatgtgattcactgaatgccagatgtattaatttatagtggaacaagtgaccatttgagtaaattgaaaattaaaaatctgtacgtagtccgtggtcatctgcatgctattatcctttgccagtgccgatgggctagcatgatcagtatttcccattttcaggatggacttaaggttgtgaaggagaagaaatcatttgttccaccaccaaagttatttagcgccaatgaggcaaggtgctttttcctccgtttgtaatcagtatgtattcatatatatttgtattgctgcaatctgctaactcgattgtaaataaggagatgaacattcgtgttgaccggaggaggaatagagactctggggaatactatgaaatggttgatggtttaaaattcaaagatggtttcttgcacaaaacgttttcaataaagtcaataagcgcacacaatattcagccatcatttgatgaactggagaaattcagggaacctgataatgacataaatgaggatgcggccagcttgtccaccctatttacaaataggaaaaaagggcacttcatgaaaggtgattctgttattgttattaaaggtgatcttaagaacttagagggctatgttgagaaagcagaggatgccactgttcatatccgatcaaaattacctggtcttctggtaattacttgcaaaaggaattttcatgtcattttcaatgtagccattacgaatttatacatctctttgtgtacctgcagaacacacttgtcttcaatgagggggatctctgcaaatgtttcaatcctggagaccatgtaaaagtggtgtctggtgttcaagaaggtgcaacgggcttggtagttaaagttgaaggccatgttttgatcattttgtcggacacaactaaagagcatgtgagggaattttcgtggacataagtataagaaactatttggataaacttccattatgcttttgactttctgatgtgtttatatgattacagatccgtgtgttcgctgatcatgttgtggagagttctgaggtaaccactgggcttaccagaattggtgattatgaattgcatgatcttgtacttcttgggtaagctcagaatttctaatgagccattgttgttgcttacaacattgaacggctatgtaataacaatgttcctcccattcaattttcagaaacttatcttttggtgttattataaaggtggaaaaagaagcacttcaggcaagaaaatttgtatagaacatttcacgtatgcctaatgatcttttgttcccatattttttgtgtactaacccccaaaatgcatttagattctcaagggagagcctgacaaacctgaactagttcttgtgaaactcagagaaataaaaagcaagatttatcggcgaacatctgcaaaagatcggtccagtaatatcgtgtcaacaaaggatgtcgttagggtcattgaaggagcttgtaaagtgtgtacagtttattttatttgtttttagcttttcatattatattctgttttagttttttttctgtcagaatatatgtttattacattatcccattatactatatgtctaatacactttgtcacaacagggaaagcaagggtctgtggaacatatacacagaggagtactttttatttatgatcgtcaccaccttgaacattcaggctttatctgtgcaagcgcacaatcatgcctccttgttgggggatcaactggtagccgccgcggaaatgtatgtttgaagctatttacctctgttggttgtcttggaagattttcctaaccattttgcttctctgatacagggtatgggtacagttgatccacgatttggtgcttttagatcttcagcaaggattttgcaatctccaggaaggctcccccctaaagcacctcatactaattgtatgaatattatctgcacagctccttgttttttttttatttaggctgcattgctctgctaaatgcaatagcaataccaattcataattgtccttcctatctaatgcagatggcagacggtttggaggcagagatcatggtggcaaagggcatgataccctggtgaatagatgtatcaagattaaatctggcccctacaaaggatatcgtggtcgtgttaaagaaatgacgggagcacttgtacgcgtggagcttgattcacttatgaaggttgttgcaggtgaatctttgttgtcatttgttctatttttggtgggaactttgcgcgcatttgtattaagaagggaagcaaaaaccaataaaaggagatcaacgagtacacctcttcatgcagcaatcgctgcggacacactacaactttcattcctgagctgcattccttccaaatccccactatttcttctgatttttaaaactatcttgcttcaaatatgtagttaagagagaagatattgctgacacagctactgttgcaactccattcgggtaaatttcttcctccttgtccgtatatttggaaagctgtttgatttcatttaatgactacttgtatcgacagtgaatctcataattcatggggcaacgaaacacctgtgcacccatctagaacgccactgcgtccttttcagactccattgcgggaccctggaggtgtgtccatcttacatgcattatggttattataaaaattaagacagctaagatcacttatttgttccttccgtttacaaatatgtagttttggacataaccgaagcaactttgactgctaaatatcagaatatgtttactaagaagtaacaaaaatgttgtattatgatcccaatgtagctattttgggtcctaagagactgggaggtttatctataatgtcataaatgtaaagtggagagaagtactaattccatggcactactttgtagttttgttttctttatgtcatctactcaatatgtaaaaaattaatgcggatagactttgctacttagtacttgagtactcagatggtgatggaagatttatatggaggctagtgcatctgtactgtttagcagcataatcaatggctatcatttctctactgtttaatcaacttaaactatatgagtagtcacctctttgtatcttgattggtgttgttttttggagggagcctttcctctcctgaatgcttatcaggaagcacttcgaaatgggtgtgatagatgtaattcagatgaacgatgtaaaatttgactggcgttgtgtcgttggccaaacgaaaatattatgcagttcatgctataaatggtatttactttctctctctctcttgcacacacacatattaacaaggtgttcgtcttttacagcaacaccagttcctaatggaatgcgaactcctatgcctagtcgagcatgggcaccaatgagtccaccaaggtttgtatgctgacattatgtgcaatttagttttataatgaaaatgaattatgttgtgcaagcgagctaattctagtataagtttattttatatagatttgttgttgactaattcaattattacaggaatggctgggaagatgctgtcacttgggaaagcagcccaacttaccaagttcgtcatgcacttatgctatttcttgactgctctttattttctgtagattagctttgggttggcaatcaatggtaagtttttgagcctctacatttcacttttgcagccaggaactccagttccccagccacacgaagcccccacccctgggtcaggatgggctgttacacctggagttagtttcggtgatgcctccggaaaaaatccaagctcatatgcaactccaacacctagtgggcaaccaatgaccccaaatcctgcatcatatctcccgagcacacctggtggtcagcccatgactctgggttatattgaaatggatataatgtctcctgccataggtaatatttttatccttcgaattcgttgcttctccagcaaaatgcattctacagtcaatctggatggtgatcgaaactatctagagctctggatgcacttatttgggtactaattcccaaactgctttcaggtgaggagggcggtaggaactggcttttaccagatgttttggtcaatgtgctcagggaaggttatgataccacctgcggtgtggttaaggaagtcctcccggtgcgtactatttttacatctacaagatgacccccctaattcttctttcactttcctacactgacacatccttgaatttaaactctaggatggatcttgccgcgtcgcacttgggtcgtcaggcagcggggatgaaataactgcttttccaaacgagtttgaggttgtcaagcctaagaagaacgacaagctaaagataatgtctgggtcttggcgtggactcacggggaaattgctgggagtcgacggatctgatggcattgtgaaggtggatggtctagagacgacggatcagacgaaaattctagacacggcgattttgggcaagctagcagcctgaggcaggccgatcctacaagccagacaaattcttgttcatatcttagtgtagcgagtagtcagaggtgtacatgtattttaaggtgtcctatttgtccctggatattcataccaggatacgctctcgtctcaaatgacaaatgatactgaacaagttgcgaatgccagctgcatcgttgacaattgatgttgtctgcccttggccatcaggtcgtcgatacatagattgctgtaccagtcattactctagaaagaaacggaagaactttttgcaaagagatttcacataaattgagaagatgacatcaagactcaatagcgaccaaacaaaagtacaataggctgtattttataatactaagtatccaagtcattaccgagagatgcaacactaatttatgctttcagaaaatctactacacggtgtcctgtcacaacgggataaactggataagatctctgccttatctccttcccttcccctccacaaactcactcactctctctctctggataaggccgagaaggctgagaagaagccagccagaaggaagggatcgtcgtcgtcgtcttcggcggccgaggaggacgacgacggcacggcgtcggtgaggtcagggggcgtcgggggtgatctcgccgcacttcctcgacgccgtcctccgcccgctgcggcgccgcctccgcgcgcacgctccccgtcactgccggcgccggggctgctgccctcctccctcgcgctcctcgccaaggtctccatcgcctgcttctcatgagccacttgtgccgccgtccttgcccgctgctcctgccgcctccttgccggtgagcgcaggtggatcctccgctgccactgtagaagcagaagaagccggcggtcccggtgcctcggctgccgcaacgccggcgacaacctgctctagaacctctacctcctcttctttgccatcaacttgaagatgaagttgctgcagcgcgtgttcttggagatggtcaccgttgacttccggccggacctcaccaccttcagcgtctgcgccacagccttctccatcaggcatcagtcgtcgtgatacctcagtattaggcctggtatccacaagtatcaggcctggtacaagattacttagtgtcaagcgctcttcgtcgatgtcgacgctatcctcctctcatcagtgttatgtgcaggtacggactgatacctaggtatcaagcttggtaccaagtactaggggtatggtacctcaagggtatcatgcctggtacctaagtaccatccagtatccatgggtaccatgtgcatggtattaggtaccagatacctataattatcaggtaccacatggtacctgatacctattgtacctgatacctcgagggtatcatgcatggtacctaggtaccatccatgggtatctgttaacagtgaaatttggtaagcccagagtagtcatcggcttagagtcagcatcggcttcgaagtcctgagattagccgatgagagttgtcaagtcgtcagttgtcggattcttgctatattcggttaaggaaattgatctactaaaggaagcttatccaaaagagaccgagttcaaagagaatgcggcatggcaagttatctattaattaggaatagtttgttagtttccttttatctttaggaaagtgtgtttagtgtcctataaggactttatcttttccttttatctttaggaaagtttctttcttgtccgacaaggacttgtatcaacccatgggtataaatatgtacacctggggtctatgtaatctatcttcacgatcaatacaattcggcgcatcgccaccctttttacttctacttttgttttacgttccggcggaacttggcacccggcgcggggctacatcgtcttcgatctccggcgaagggataagtctaatgttccgccggtccaggcaattgtatcgtctacgtcggcgtcgttcaaggctgcatcagtacattcgacctcttggattgctctggtttggatgatatatttgcctacctatttatcatatgtctctgttaatctagtcttagcatatcaatttagctctatcggctgcttctcgttttagggtttctgccggtatcggctaaatcgcgttgctagattagattagcttagacatctaccaccctgaaaactcggtcaacagcttgattgtctagatattatgtttcttttcatacttagtgttacatcagttaagtttgatctactaagtcgtgcttagaaccataatctctagcctgcttttgattgccactaagggtttcatcggggtttcagccggtgagttatctggacgttgcatcggctcataaggattgcatatacatataagttggatttagccgatgacaacaaaggtttcactgtttaatctaatcttgtggatttcatgacatcggacctccagttgatgtgtgctttaaccttcggatcgatgcttatttatcatatcattatctgccgattggtttatactggactatattattgttatattttattatcaacagccgattgcctttatatcatcatctacattggacatatagccgattgcttacaccctatcgctatcggctagtatcggcatcggctattatcggctatcggctggaactattccatcggcttgtcagccgattgactgttttgatctattatttgcatatcttgtcagttgcaggatcaaactgactggcacgctcgcatctaatcaagatttggacctgcacaggagctaagcaaatctctcagccgatgtgttcgattttctcgtcaacagtaccatatgcatggtatcaggtaccagatgcctagtacctaggtaccatccatgggtaccatgtgcatggtatcaggtactagatacctatagttatcaagtaccacctggcacctgatacctattgtacctggtaccacggtcaaaggtgggggaagggggagcacgccgtcgccgcctggctgaccggtggccacacgttcgttgcctcctcttctgttctcccttcctcagttcctctcctcaacgtttctcttctccttctgttgttgttgctgtcggtgggggcaaagaggaggatttagcgggggagttgtctgctgctcccgctgcttaggggcgacgacgccgacgaggaggtgtgtgcttctccaggtgcaaaggcaacacgacgccggcaagggaagcgcgcgatatcaggaagagccagctaggtatcgtgcctcttcacgtggacaacagggacacgggacgccatttttttattttgtcgtgtgttttaattatcccgtgacatcacttttccacggtatcttgtgggctagctgccctcttatgctttactccttccgtttcaaattctaggtggagtagtagtacttagtccaaagaaacgaacagaactgtttgaccactgggcacttctcagctcgacgtgatgggactagttcatcaaggactcgaactcgttatatccacagttaaatccgcgggacttgcacggaattgactgtgccttcgggtcaataatcttgatcgcctacagtgtaatccgacaatatctatcctatactattgttcaggttggaaaagcagcagcagccgctagcttggtgtgtcaaggcggctgtcaacaggcaagctcgagcgagctcgcctgtctaggcttgagctcgatacaagctcgagccgagtctataaaatgttcgacctttcaaacaagctcgatttaagcttgagcttgatttttaattagaacaatatatattttaaaggataatctttttaaaaataattaatttatgatctatcgtagaagaggaaaaagaataaaataaatatatgatgccaatacaaggtatataaataacatatttgatctacaaatttattaaataacaataaaaaaaatctagaagctcaagctcggctcgacaaagctcgcgaactttaaaataggctttagctcggttcgttaggagctcgagccgagctcgaatcgaacttaggacgagtcaagctcgagcagctcatgagccttgagcttttttttttttttttttacagtcctacgtcaatcccgtgccatgattcccatgaacagcgccaggtacccgacgagccaaatcacaagcgccaggaacaggcgcggcaatgacgacaccggctcggcgtacacgccaatgatggccgtcgctccaagcagcatgaactggaacgcgtagacccgctgcatcggcggcctgcggcgggcgcgttccgtccttggtcctggcgcctccttggcgacaccgccggcgtcgttcggagccatgggattaggacggatcaatgcaccacgagtccacgacggccgacgccgccgtgggatgtgtgagtaatctgagtgagcgccgcgagacgaggtgttttctttccgaatatggcttctgttctgggcacgaactctgattaccttatttatagctgtcggccggtatggcagttcgggtgtgtgtgcccgtacatttcgtgcgatggatattggctgctgtttgtctgcatcctagcccttgggcacctgcacctgcagcttcggcgcagcttccttcgcgggatcacggcgtccgcccgttgctttcacgagcgaacaggtgacagtgacctgacctggctggcttcaatccgaggtgtctccacgtctgtacatgcacacatggcgcatgagcattcgtcacctgctcatgatttctcgcggcaaaaaacatgggggtggcttcagtcaagatgcagggtcattagaacaggtcgtgaccggctaatcattctgaaacttgttaccattagtcggtggcgccgaaatttccctgtaatctcgttcatttctcgttcgctggtttcggcctaacaagacaaaccagcggttggtggagcccaagggtttgggaattctgctgtacgtcactcgagaacaaatattcattgccgacccatttaaacgactcaaatttgagtattcttacagattagacagaaacaaataaagatagtgttattttttatctgcctgttcctattctagaactttgacccttgtatgaatagccgtactttatttagttttatcataagaaaacaaaatgctaccagcccatcaattaaaatatatgtttggcttctttggagcgaaggaaaagtggaggaattttggaggactaaaattcaacagaaaaatttcccacatggtcctttggagaattggagtaaatgaatggcttctccgaaatcatttgattatttcatatgaattttggagaaaaactctttgaattatagaaatgaaaaaaatggaggaataggaaaaatacttgattcagataataatacaagtataaaacatagaattgcaaaacatagaatgatcatttgattggaccatatagatttgagaaaagataaagatacaaatgaaactttccatgagattctactcatgttaattttcgtccaaaacttgcatggaatgagacattcttcatataattctatagaaatgaaatccttcaaaattgatatgattttcctttgaattaagggggcctaagtccacttgcttttctataatgttaccagacaacacttttttgcaaaaacctcgtggatttagtccctttgagttcctctgaatttaggattatggcacggcatcctaatcctgagattttcatgcatctcagggtttacattaccggttgaccactaaatttcgagccccatcggtatcacggttttcgataaatttcgatcggttatcgataaatttcgactgaattttgaccaaatctactgtttaaccttcgaaatttcaatcaaaacttaattccgagtcatgtcgaaacgtcgaaatatcatggaattcgacatgtttttgtcgaaaatgtgaaccctattctcaagttctcaaccaatctagaatcggcccaacccacctaaaacaatccctctccgagttgggccaaaagttagcaaacccatctgtagagcacggcgcccctttcttccccagggatctccccctccatccggcggccgggcgacggtgcgagagagtagagagagacccgagcgagagtccgacacggggccagcaagcgctgggataatggcgacggcggagaaaaagaggcctcggagcagaagcggcggcggcggcggcggcggcgtggagaagaggccgagcaggaagcaggtctttatatttctctcctctcctcttgttgatggggccagtatcgatagctcgttcgtttcaccctacccgtagtcgattactcatggctgatacgatttgttttatattccgcgaaaccgaatagctgataagattttgtgtatttttttagtagatggtgtttggcacttggttatgtcagagttcaattagcgcgcacttcaaaccctacaagtgtgtcgaattcctttattttcataaactgcgaaagctgcagtgtcaactttattagactcatgtgttcttctgttgaatacgtatgttgcaacctctagatttttgtcaaaagttctttttttaaacttatttggtgggtggtttgtcactcctgtcaccgaggtagcatttgaggagtaatagcggagatgtatctaatatcagggtctcattcagataatcttctgcctttgcctagatattggggagaaagaaggctgttgaagaacttatcaggaaagctgtagccgtgaaggatcatctagcgcaatttcctgattttcataagtatcagagaaatggtaacctacattgtctgttggtgaacaaaattcactaccttaggactagtaatgttccatcatgatgtagaaactattaatattcccagcgaaaggaaaaaaaactcctaatgtcaaatttacctctataattccaacactaggccctaacaagtcctattcagtacaatgcaattttcttatatgtgtgttgtgggcattatatcaatctcaccttttttatgcttaggtcttttggtctacttggagtctggacatggaaatcaacttccattatcaacaaggaagtacatccaaaatcttctcaaggtcacatatatttctctttcattttgctcttagtgctgctggatattttgcatatcttccttttacagtttccccataaatattgaatgtaatgctagaaagcaataatataggttaacatggagggacaatatgggccagaatggccttcagaagagaaaattaagcgccgggaaatggttgccccagaagcacgatatatctttgtccggcaatcttcaaatgccattaccacccaaaatattatgaagcaagattccgggctagaatttacacatgaagcatgtaatgaagatcgcttgattggttttgtacactacagatttgttttggaagaagatgttcctgttgtttatgtctatgagttacagatggtgccttctgcacaggggaaggggctgggaaaatttctaatggaattgattgaacttatagcttgtaaggtaatgtgacttgtttaacaattactgatggtttactaaaatgacctgctcaattttgtgtgtacatatttccagaaatattatgcgtacttatattcttctatgatacctcttattccttcatctgtcttatcatgtacattttttagcataaaattgctatctgaaatctcagcatgaaggatcagctgattttgatggcgtgtacatgcagagccaaatgggagcagtgatgctaactgttcagaaagctaacaaccttgctatggctttctacaagaagttgaggtgaagtgctaggcttgaatatttcctccacagtttatttatgctaaatttataccttatcgttggtttgttaatattgcagtgactgctggttgaaacatttcaatgtaactcttatcctgcagatatgtaatatccagtacttcgccatcacgagtagatccactggtattgttttgcctataaactatagtttttattgattaagatgttcatatcgtgatccttccagtgtctacagattgggcttgaaaaaaactatgagattttgtgcaaggcatgtgaatctgaagctaagtccaaattagaggtatgcagcatgttgttcagtgttgcataaatttactgctaccttcttgcaacttctaagatggttgagtctgatgaatagaaaaaatattcgccagacaggcatattaatcattcactaaattctttatgagttggctgtgttgatcctttttcttagtaacaaatcttctttgtttagtattggctatatgccaattactcactaatgcataatgtggtgaatttgcattaatatgatgtaaaacaagtccttgatatgtatttttgttaatatttgcaggaaggcaactgaaaactccctgcgcaatgaccaatcttgttaaaatgtgatgtgatgatggatgttgttctccactacagttttgacaccttacagggtacagcactacagctcatgcttgagcggccgcatatcgtcaggacaccatgttatcgcaatgcattcagatgtattgcacatttgcactgttcttgtctgaatgaagctgatcctgctaatccatcctgggaaacaaacacgattggctggcccatattctttccttgcaaaacgcaaatgtacatctgcacgatggagagcatatgaaggttgcatgtcgtaggcttgagacgacagtaatgcaactttttgcaaactatggatggagattcacaaatagacttgaataaatgtatactccttatcttggtttggtcttttattttgttggtgtgtttaatttcattttgaactacgatactttgtaataattggctgtagctctgatgagcaaaggctggaatgtttcattccattatctaaaaaaacatctgcacgtttctcaattttacttggaggaaacatgctgttgctgtatggtcgtcaatattacttcaggtaggatggcagatggcaaattcgcaggcacgcatagatacgaccccgagagctcaagccgctcaaggcgcgttgtcgcgcttcttccgcggggctctcttcccccttgtgacgatgatcgcgtcgccgctccaggtctccacctcctcctccggctccggctgcggctcctcctcttttgcacatccgcgcctgagcaggagacgcttgcgcggcggcaggtggtgctcgtccccgacgccggcgtcggcgcggtgctccgtgcggcgcagcccgcagctcgcgcatatgcgccgcctcatcttgatgggatacttgcgctgtttctccgtgaacgcgccgtcctcctcgccaccggcgaacgtcgtgcacacaggggtcaaaggaagcgagagcgacctattgctcgtgctcaacatcgtcccgctccactgtagattaatctaagttcgatgtggatcgtattgcctctcgatccatgtttttgtaggtctaaaagagctcgggtttttctgggatgaagaatgcttgagcatgcatggggcggcacagcaccatgggaaccgtcttatgattgttgcgtgtgaatcaaagcatgagtttgccctgtgtgcgggcgttttgctttcgtttcctgacgatgaagacaaaccatatgtctcggttcctcgtgcgagaaacgagagccacatcgttcgggttttccggttgctgcccatttggtgccgtgcgtccgtgcgtgcgcctttcgtgtttttaacatctcgcaatggacagtgccagaacgcagcaacagaaagtaagcgtgggacgaggatcaagttaaaccagacattaaaaccgtcgtccgagccacctttagatcttgcttatactagttttaaaagttgagcaacgcatgcttatactggttttaaaagttgagcaacacattatatctagtaattcctccgtcccaaaaaaagccaacctaaaaagggatgtgaccctcctagtactacggattcgtaggactaggaggggtcaggttggctttttttagatagagggagtaccgattaaggaaacgatttaaacccaacctcaaccgaaaaccatcatccgaaccgtcttgagatattgttttcactgattttaggagttgagggacgcgtcatacagtcatatctgatactccctccgtcccataatataacaacctaggaccagataaaatatttcatagtacaatgaatctagacatgcggcctgcccagattcgttgtactatgaaatgtcacatcctatactagattgctatattatgggacggagggagtagaggtttagggcctgttcattttgatgccattttcaaccttaccaaattttggtaaagttgccaaaaatatgtgtacgtttagtttcctgccaaattttggtaactatataagaaatcctgccaaaattttggcaagttaccaaaattttggcaactatgccaaaattttggcaatttggtaaagtatttttggcatcaaagtgaacaggcccttagacatgaattttagatttggcgacaaattaagggatctgaagtgaacttatgcccccaattatctgtcgatctctcacactcatggaggcccaataaacttatgggctgaatttagttagcccaacaagccagagtccattatcaccgtgggcccgacctcttcgtccccctcggctctctctcctccccctcggctcgcaaccgccatggagccatcgccggagattccgccgccgccacccgccttcgccgccggcggagaaggcgatccgcatgctcccaccacagccgccgcccgctcctcctcctcctcctctctatttcctctcttccccctctcggcgcccgaggaatcctccgcccccgcggcggggtcccagtggctctcaaaccctagcttctccttcgacgcctcctccctcaacatccccgccactgcctcctcatccgtaccgccgccgctaagcgcctcgtcggacgaagaggaggcgccacggcccgcacctgctaagtatgacctgctgccctactcaccgtcgcctccggcctccgacgaggagaggagggacagacggaaggataggaagaggaggaagcggaggcgggagaaggagcggtacaatagcgcggaagcctcgcgaaagccgggggttcgcgcttgggctgggtcggagacgaagttggctaaggattactacttcgacgccaagggcgaccaggataacttggcgtttggatcgatatacaggtcaggtttttgcatatgaaatgtgtagcaaagctgaacttgcattgtcatctgaagttaataatcaggcatacgcactgggtttgttccatttttgcggtatcaggttccatttgaaaaccatgggcgtttatgttaattgcgcaattccatgaaggtgtgctagactagctgctaaagtggcatgttagatgttgtgcaggcttgcttctgtttagggcatcatcagaattctcagtatcaagtttgttttcctagattcatagctacttgtttaaacatatttgttgtgatctctgagggaaataaataaaagcctctgggctaattgagttgcaagaaactgttaggcaaatttactgaactcgaagctcattaatgtttagtcccctttgaagttaagtgggctgatttgatttcgtcttgagaaaagcgagatctgatttaaatagaatgaatcagcttacatcatgctttggccagaatattaatgcttagtgtgattttgtgactttccatttttttccttggttcatgagttgattctttatttttctgctttcttcatttttgtttagtttgactgtagatgcatttttcattttactgaaatttgacacacaagaaaattatgcagaatggatattgcacgctacaagtctcaaaacatgccagaggcacgtggtctaaaacggcttttgtttcataacttgggtgtctcggtacatatgggtcatgagtcagatttagatggactgaatagcaaagcaagagctggaggtcgctactactcggcgaaatatgcagttgtagaaagaaataagggtttcaaacacctaaaagtattgaaaaaggataactctgcaattctcccagaagattttatccccctagggataccatctcttcctgaaaataacactactggggaacaggaacttgaagaatcttgggaagatgaaatacttcggaggacacgagaattcaacaagatgtctcgggagttccctcacaatgagaaaatttggttggactttgcccgattccaggtattaccaatttgtctgatgttataatatttcttttgtgaaacagtgcatagtgtgatccacattgttgttacttttatgggatatcattagtagttacatagagagttctaagatatcaaccttattaatataatgtttcttcattcaaccttttccttgtccgctctttataaatccactgaagaaattttctctgctactttttacaggataaagttgccagtactcaacctcagaaagcagcccgtttgcaaacaactgaaagaaaaattagtatattggaaaaagctgtagagcttaatccagataatgaagaattattgctttatcttctgaaggcatatggtgagagggatagcacccagaatctcctggataaatgggagcagatactcatgaaacacccggatagttgtaagttgtggaaacagtatctacttctgtgtcaaggggaattctccagattcaaagtatctgacctacggaagtcttacgcttatgcagtacaggctttatctgcagcttgtactaagctatgtaggcaggttcaacttcagtgtttctttgtatatagttcagcttatctgctccccctcccctttttctatccctctctcggcatgtatgcactgttagcgagttaaaattttctgatgtttattctttctttctttttttcacaggatacacaatatgatcgtctcgaacctaagtattcttccttaattcatcttgaactcggtctagtggatatatttgtgaatttgtgtcggttcgaatggcatactggacatcgggaattagcaactgcactatttcaggctcaaatagaatttagtttattctcccctccccttcatctgaccacaagcagtaagcaaagactctttgagcacttctggaacaatggtggtgctagaatcggagaagatggggctcttggatggtccagatggttggcaaaagatgaggagagtagacaaaatatagatatacaagaaaatacccaagaaactgaaaggggtggttggagtggttggtttgatccttctctaaggactaatagtgaaacaagcaaagtggaaccatcgacatctgatggaaatgatgcagaaaatccagatgatgaggacccatctgcacaagaagatgttgaatctttgctgaaaaagcttgggattgatggagatgctgattacaatagtgaagttaaagatccaaaaacgtggaatagatggtcatttatggagttatcaagggataatgaacaatggatgcctcttcatgaaaaacttggtacgttattttctccttgtgtttgtagattgacaaatcacattgtttttttagctaacccagtacttacactggatgccattttcatggacaggatcactttattctgatgatgctccaactggagaagacaatgatcagctttccagagtaattttgtttgaggatataactgagttcctgttctctctatcttctgaagaggctcgcttttctttgatatgccaattcattgatttctatggtggaaaaatttctagatggtaatttcatctacttcttttcagataagctgttgtcattctctgtacgcaaagtctactagcacttgtacaataaaaatggcatttcgacctcagtgaaacagcaaatattattgctcattttttaaagatgtgaacgtattccttaagatcatcactatatgggcctttgaaagaacatactaatgatagctgtaactgtataatgaggtgtatgattcaacatggcaagtgcatcttaattttagacttgtgctgatcatgttgatagttttacttgaatccagaaattaaggaaaatagatggtaatggtattactgcccaggagtttatagtccttgcaagcaaacatttggacatgtaggatgaaaacagagacgatggcagtgagatgtgaaatgtgttatatcagccttgtcctcattttatgtgccttaaaaatctgtattaattatgagcagttcattgggttgcactatgaataagttgttacttttcacaatttgtttcttgccattttcatattgttgtgtaccaatgagttaactacaggatatttttacattccaggacatccaccaacagttcaagttggattgataggaatttgagcctagagatgattacagatgacattcaggaagatcttagtacggtgtctaaccttatagacaagaaccaaacttcagttcataataaaatggtgtcattgttaggaactatgcatgaattttctcaaaggcctggcactgcgaaatttctgaaaaatgcaatattgcttttccttgatgtattccctcgtaatcatatcctggaggaagctgttcttgttaccccccaaattcatacagctcaagaaaaatatctggctactccagccaccgcatcccgggctttggccaaaaatctattgaagaaagacagacaggtatgccttgttccgtatttttggcatcacttggctgagtagcataacaggtgaaaactaggtcgttagttgtgcaatgagcatacagaaaccggtagttttttcatgtgttttaagctagctagttgtgcattttatgttttcttgaatacgtgcattgtatttaatctgcgtctcttggtagactggatgcatcatgcagtttgggaaccaaaatcaaactgagttcttcagagattgagacatgtctcttcaattcaataacatccatttcatttaactagctcaaagtatttcaacgttcatcttattttggatcttgcttttccaacagttccatgtgtgcatttttttaatatttatatacctgcactacatgtatcagtaaatattcttaacagtgatacttggagcacgacgctcttttcttttgaaataagaaaaaaaaactgaaccatgtcacctttttcgggtaggatcttttgctttgtggaatatatggacgaattgaggctatgaatggggactttgtcaaagcaaggcatatattcgacttggcactatcaacttctcaaggagcttcagaggtaaaaccataaagtaaatgaatcagtatgttcagatccaaaaatacaatcaatgttgtcattatgtctttgtaatgtgccaatgctgctagaaatatagatcagtatgtcaaatgggtctcactcactacctcccttccaaattccaatatagatgtagttctgtatattgcaatggttctctgacacactgctagcaattatacccttcttttacattatacattgataagcattataaaatgtactgcctggaattagttactgtgagaaacaataacatgatatctattagtgcttaaggtttgaaaagttttttttgaaagtgttgaaagtttgactgcgcacctcctatggcaagtagggaacctctattttggaatagaggtactcactcgttttcacaatattattttcaattccaccatggacacaaaccaatggtcaccaacttagatcacatgctataactactcaacctattcgcaatattatgttaggggtagctactattatagagtggacattgtgacacttggttttctcaatagacaatcattttgatgtggcctgttgcaagaaaattggctaacatatttttgccattcaggtttctcacattggtctagcagcaatctcgtggttgagttagaataggtttcaagcaactttatgaaagcatatactacgtagttaattgtcttgagcagtttatgttattggaaaggaaacaccacatcggtacttggtcagctatgtcaaacatagttttattgatttcagggctctattcccagcacaacaatgtgccttatatagtcttctattctagcacatttatttatgctcgcttctgctttcgttgggcaggatctcaggaagaaggttcctattctttatttttggtatgctgagatggagctagcaatatatgcttcaagaaacaattctgactctgtggatcgtgcaatccacgttctgtcctgcttaggggacaaggcgaagtatgcttcttttgatgggtctatatcacgacctcaggtgttaaaggctcgtcaaggatttaaagagcagattagaagcttgcgatcttcatttgcaagtgatggtatgaaagaagagtctgttgctctaatctgctcagcatctttgtttgagagtatgacatctggttttgcttctggtcttgaagttatagaagagaccttttatatgacaccttcaggtatttcatccttcagcacctttttcttgataatctgaatgataattactcatgcctttacttttagctcatgtgtatgtttatttatctataagcggggcgagttgacttttgtacaaattgtagccattgtttgtcctcccatacttttttctcaagtactagtgatagtctaatagatactgatcataaaagcaaccacatgctaagccattacattttctgttcctttaattgttatatattggctatctaccatctgctaactattgaattataacctgtctttagggctctgttagacgtattttttagtttgacatttgaaattgttttcatgtatcttgctaaactcttagatattttacaatcttcaataaacatacctattttctgactggaagtgacaagctcctttctagtactcccaaggctgctcaggtgtcaactacagcttttgataccaagattttgcatgaagtatcaagcttatttggatcacaagtctccacccatagtccaaattaactagcatttcactgtagatcttacatttattttatttctgcagtgcttgatagttcatgattttatttatccttttcatttactttgcttttctatgtctgtaaatatgtattattattctcatctgtcaaattcgcaatctattaagcatactcttatcatgatttttcagagaacaaccatagcttagaattcgaagaattgtggatgcactacatcaagcagcttcagaaaaatcttaatcagttgagtctctcaagggtttggccaaaaatatcgcaaggaatacaaacatatccgtacaacccaaaatcatatgcagccatgttaactctaggttgcctttacagtgtttccaataatctacgtctcacactcgacaaatttaatcaaaggtgagttctcttccctacaaaatccataacacactgcttttattacatgctatggtgttcttctctgacaaaaatatggaatatattgtgtaataaggtagaaatgtaattgatcctgctaatgattctcttggtctcctttagcaatacatttttttgtgatgcttttcacagtatatagagatacatttgtaacctgcgaacttcctgacacagtaaacagtatatatcaagtatttttttttcctttaagtagccagtttgggtgcatgcactcttctaaaaatatcttctgaagtgcgcatggtattgcattgcatatttactgctctttgtcttttgattttatcagggatccttccataattggcttgctctttgctttgtcctttgaattgtgcaaagctggatcagacaatagaatacacaatctgtttgagagagctctgactgatgataagttacagaaatccgttctgttgtggcgctgttatctagcttatgaggcagagatagcttgcaatgcttctgcagctcggcgtgtgttcttcagagctatacatgcctgtccatggtatggtactgaaatatgttgtcgcaatttgatgtttctctggttatacttacatgattgcttattctatcatccatctatatccagctatttttatgtagccaatttggaacaaagatcatttatatgttttttgttacatttgtatcttatacttacactatattactagagtacagaagagatctcatcagaggataatgggcacctgaactttgttgtgctattgcccttacagatagctaaatgtacaatagagtataaagtttaaataaccacacttttttggaagaaagtgctttgacagtaaattggtgttcttgcaaatatggttgctctatgaacttgttacttggaactcggaacttgtagcttctgccttttcttttttatttttttatcaaaaagttccatctttaattgtgggtttgggaaacacaagttctattttcatgttattttagctgctattgttttctaatattaaacatttaaactgtaacttgagtgatggccaaactaatgacaattggaacttggcactcataacaagacatcccactttgcaggtctaaacgattatggcttgatggatttgaaaaactgagttcaattttgacactgaaagagttgtcagatctccaagaagtaatgcgtgacaaggaattgcacattcgaactgacatttatgagatactcctgcaagatgaaacagatacgtgatgcagctatccctgtttttgtccataattcgagatctccatattatctcaaggttccatcttgcaactgaagatcggttgcatgtgatcttttaactcataattgttggactctcaagatcggttgctcaggaacctttatgtcgcatggaatgtgatctggacacgatgtacatccaaagcatctttagattggcaatctcgtgacatattaatgtgatttattttctgttcctggagacatatgttcggcttgtgtctggtcactccaatccttgtatttggttggctcatgcttcttggaagggcacaactgcaggaagaggtcaatatgaagtaatgatggaggaaagcatagagcggcagcataaagttgaaattgtcttgccaaaatggaacatcaaaagctggcagagaatcgagttgataaataaaaaattactgcgtcttcaggcaagtgatgctgtattttacagcaaatatgtttttttagtttcttcgtcattttcttactgcacttgctcatggtactccttgtgaaagcaggttgggggtatttatgcagtaccctagcgtcaatcaaaagcctggagtatgtcttcatttatcatctttctgcgattaaacgatgcttgtcctttttaaaacggaaagaaggaaagcttagttctgaacataatatactaatattgtggtatatatgtgtacaatgcttgaagtgacacatttttttttgaaaaaaaaaagaaactaccgtaaaaatatgactcggtaattacaaaagagggttgctagatgaggggtgcatactacctcttgttagctgagtctgctgcagcaaatgatgttagtaggtatagttgtataccatgttctcgtaggatactgtttactctttatttgttatgctccgctgctgtgatgcctgcgtcctatactcctagccaaacgcccacgcgatacggcgatggtggagagaggccgataggctatagcgctttcgagtattcttgtattcgacggtccatttgcagttacacgtagcaggtttattgattgttatgtgctgatactcgctagttcattgccgatcttcctcatcagaatccgggataagggacttcctacgcaggcacctaaaggctgtgccaatatacatcttggtttatgcttggcatgataagagggttgaattgaatacagtactgaggccccgacaaggtaacgatacaatgcagtcttccatatgtaccataccttgatgcatcctggtgaatttgaaccctcctcacccacaggatgtggctatgtatttacaagggtgggtaaactaactcccccattattatcctaacttcctgaccaagacatttgtccgttcagttctccatataattggttccttcacttcaccctctcgttctgatgatggttatggtgccctttcctgccgtcctgatccttgtgaggctaacaactgctttgccggacaggcctagtccatgagcgtacacagcagggctgcacgcgaactggccgactgggtgccggaccggcctggctggccgcttcaggatcctctggttgacgtcgttcagcgtcgccgcgccgccgccttctaaccccagcggcttgacaactgcaaacgggtacagcacgcccgtgtccctcttctccttccctgtgaatgaatgaccaagaaatttcttttacacttctataaacatcaacaaatgcaattcttattattaaggggggttgaacagtaacaacatgactatttacttcgtccgtcccaaaatacttgtcattctagatagtttagcagggactaagatttcagaaaaaagactataataccccacattaaatggtatatatggttaggagtggagtagtagtttaggggtagaaaaggaagaaatttgaatatagaggaatggatgtgacaactagtactttctagtgataaatatattggaacaaattttgaatcctagaaagacaactattatgggacagatgtagcattttacttaaaaaccctcttcatttatagaagctatactatgaaggagtaaataacaactgaggggggcaatcaatagatgcggcctgccatgcatccatgcatgcctatgaaactgtttaacaaggcaaatacgttcgaaaccacatctgcaagactgcaagcactgctgctccccgccccaatccctgccaccgcctcagttgccacacatgcgcggcgagtgataattgcccaccggtcacccacccacccccaccccacctcacctcacctgtcagcgacgaggagcgacgaggcgacgacgcggaggcggcacgagaggacggcgatggctgctgctgctgtttgcccacgatgacgtgctcctcgcaggagtaattgccgcggcgccctggccgccctgccgctgccgctgcgtggcccgcgcctgctgcactagttgccttttgcagctgcagttgctgcgcagcgccttgcccggtggtggtgcgagaggtggcgggcgaggagttgtggttgtggaggatgggatcagctgcctctcctcctcctcctccctgcgccgctggcacctgcactgctgatgttgctgctgctgctgctgcgctgatcgggcccctctgctcctgctcccaacccgatgcgtcgtcctcatctcctgcccaataaacagggtcctaagttgttttaatgcaactactttgacactaagatcagatgtactaagtttgctgataattgactgtgatgagaagccgacagctattttgtctctagctgttgttgcttagcctgaagaaattcagccatgcagtgacgaggaagaactcgatcggagatatgattaatctggtgtttagatgtggtagtaaaagctgtccgattgaaaaggacgtgtcgatattcataatcacctgagacaaaactgccgctctccgggatcatgatattcaattcatgcatgagacccccctcgccgccgctgctgctggaatcccagaagctctgtgtgtggcaagagcaagcaacaaaacaacagcagctacgagttagctagagcaaaaggcgaggaagaagacaatcaggcacagcttgctttctgcgaggagacacgacgacgctgcactgctcttttgtacgtaagtatatgttactgcatatatgcgacattgcgacaatggagttgtgcctttccactttgctgtgatctctgttatgttcttagcactttcgttctactcgagattaattactactgctacttggaagttttacaggcaacaaaaaagtttcagtgatctcatgatctttcatcttttttaaaaaagctccagtaataagtaaccactactaaagaatgaatatattgtctaggcgccgagctagctacccactatagctacctgaaaacgcaacaagttcttgcatcaatgaatctacgatgaaccatgcatcatatatcttcgatgacgggtacattgtccatgaatgtgttgatggcatttacctgaagaaggcagtgcaggtcctcgttcgccgccgccgccgctggccgtcgaggcggcgccgccgcctccgccatcctctgccgcttattgcaacggtcgctccagtgcgcgacggcgtcttgcaggtagccactggacgcctccgacgacgacgactccggcgactccaaacctactacacacaccaacgaacctaagctcaacgacactatctcactagttcactacacaaacatgccctagctagctagcttgcaagcaaaagaggaaagcaagcgtatctgcgtatgcatgagtctacgtatatactgtgtgtgaggtggtagctagtagcagtgggtgtgtcttacgcatggccggaagaaaggcgccatgaatgccatcttgggcggcgtctcctcctcctcctccaagtgtgtgcagctgtagctgatcccaatcccaatccagctgaggaggaggaggaggaggcagcacgaagtggtcgtcgacgtagtaggagtggtagttgtctagggccatggccttactctcctttgccctgttacgtcctttcgtgtgtgtttatgtgtgtgagagagctagctattatggctgtgcagctgaatgctgatgaggctggggcttaaataggaggcaactttcgtggcaacaaaagctgtgtcgaattgggcggatgggaatggacggaattgatcaataggaggagccaggcagccagcaaccggtcaatgggaaaagaacgaataaacaagagcaaaagagcaaaggggaaaaagttgcggttgctggatggatagctccatgcatctaggcctttctcgtgattcgttatgtttgattgccctctccccctttctatcatcatcggagaatgttgccagcagtgcattcaatacattgtgaaattgatcaacagtgtccatccatatactcgccgagatacaaaagatctaaaatagatagatatggatagtacattagtacttaaaagcaatgtagacagtttgttaataatgtggtatagtttagtttgtgtgacatgtatacaaccttagaacaaaaaatattaaacgtactattttttttaattaaactcttactaatattgatgtgctatgtcatatatctagatttcttgtaactgtcatctagttaattcaaaagatttagatcaatgtttataagagctctgttaaaaaaagtttaagtacgtgtaacattgctcttttagggctaattggctaaaacatgaatttttacggaattttcacgtgacttaactcaattatcctacaaaaatctggtaaaatcatttaatccaaaaggaggaggctttctatatgttatattcatgatcataagctatttctatgtattcacaaaacatttcacgccaatgccatcacatgcaatatttgacatttgcagtagaggaattaatgccatcaagtgtgaccgaggggtggtaaagtaaaattgttgggtggggagagtaaaaaggagttgcaagtactacgtgactgttgatgtttttgttcgtatcgctgctgcaccagacggggacagcaccggtagctttagcattctttcatgaaaatctttggacgaggccaagaaaatgtgtttgctatatttctcctttttactgtaccataagttttgagcttctgccattactgccatccttggacaactgcgagcttatcatagctctgtgtacttgttacagaaactcctttgcccaacccaagtgtggggcttcacatatcaccaataatgaccaaaagggtccacacaacaatatcactatttaagatactaccagtacttaaaagctactagtagtattggatgatgtgaaacatcgaatttcagaggatgatatgaaatgtcaataattaatatgaaatttaccatgcatgcatggttggtaaacctaaagaaacagacagagaaaatatatatgtggtgtgatcattgacagattaatctgctggtgtggtttgttcatcaatcatctatatgcacaacggcacaaggaaatgaccaattaaagaatgtaactaatctgaagttctgaaccagctaatgaagcaaagaaacgtacatattgatcaataaaaggcatggtccaaaagggagatcaatcaggcctggaacagaaatgagttccccaaagggggtcaagaaagggtacgagtacttagccctgacatgaatccataagctgattcgacttttggtgtaaacccatgagttaattttacagagaaactatcgacttggaagtggaagtggcctcttttgcaggtgcgtgctctgctacttctcttctttacttgctctctcactcactctttctgctaatggtcaatgcaaaagcaaatgaattaatgctagcttccaacagttttactactccatcatgctcactcaccaatggttaagccattcctctgaagaagaaaataaaaatggttaagccaattggaccatatctacttgcctgtgtgcttactgcaactacggctagctcgactgccgtgtctctacccaaagctgcacgtccatcttgagaaaaacgtagccttgtttttttttctctgtacttttgctagggtgtgtttagttcacgttaaaattgaaagtttgattgaaattgaaatgatgtgtgtaggaaagtttgtatgtgatggaaaagttgaaagtttgaagaaaaagtttgaaactaaacaaggccctattatagtttgatttgcatatttaaccgtggcctttacctactcggttaatgattgggtgacaaacattcatgcttgcagggcttggagctagtagagtgcatgcatgccgtacgtcctactatcgtgtagaagggactcagtagcgcggctaggaaagatttttattgcgccctgtgctaattgcttgatgatctatgtagtgcattctgcggctctgcctaaacgtgttaatttgcttggttggtgacgcatttaccatgtctaatttgatagctacaatcagaaaaagattaccactatagtttatttggtggtcactagtcacaaatcccgactcaaaaggatgccggcgaaattgaagcaacaatgatactgtactacgtacactgaacaagttaattaagaattgccgtagtactacaagagtaggaacagatgatatggcctaggacaccaatagattagagctgctaatttttttttaccgctttgccgagttgtctgttgtagggtagaatcttgtactaagatgtaattattggcgactatcacctcccaaagcttttctgtcctggatcggaaactgtacgcgcgagactttgtgattatgcagcgcaaggcgcctgttgctagctgcgactgcgagagtggcaaaactggcgaagcatgtgcgagacacccacaccaaatcagccgaaagaaacagtgcgcctaacgacctaagcggagcctctgcctctagttttcaccatctccactgaccagtgctatcaggtacagtactaggtaatttagacacatggattatcctactagctactgatcactagtcttgtccactgtggtacaatgatgaacttgcttggtgtcttgtgacagctatttcaattcctctctcctcttcgatctaggagtatatgcatgttgttcagagctgcggctaatccgatcctccactaaaatttacatcccttcgagtagtagttatatactgccttgattcgaagagatggaacgaattgaaggtttgaacctcattggcatgtttcacattccccgctgatataaaacaatgtaatcggtaaggacattgttctgtccacagccatagtttatcacgtcgaatgtcgacatgtcaatgtttgttaggcaagcatttagattgatacagttgtggcaaatcacttaattatttgagctaaacttcacctgtgatcaacgatttattggtcccagtttatataatttgccacacctttaacaaattagctataaaactacttaaaacacaatttaaaatgccataatccggtaaatactttgtttcaaatggccctaggcctttgttcttttatttttcagattattgaaaatgaattatctgccccatactttaaaagatatttttttcttaaaaaacactttttcctactatattgtttagaccattttgttttaaattatctgttaagtttatttttatatattaattatttttataatgaaggccatgtttagttcgtgtgccaaaatttttttgaagtacacggatacacatttaaagtattaactatagactaataacaaaacaaattacagattccacctgtaaactgcgagacgaatttattaagcctaattaatccatcattagtaaatatttactgcagcatcacattgtcaaatcatgacgtaattaggctcaaaagattcgtctcgcaatttacctgcaaactgtgtaattggttttttcatccatatttaatgcttcatgtatgtgtctaaatatttaatgggacggaaaaattgaaagtttaaaggaactaaacactgtctaaatagataatcctctaaatctaacatgaccctaacttatttatatgaaaatcgctagctatggagtattagagccgagcatgtgcagtggcaaaattgaatggtgggcaaacacatgtactaagactgtcagctagtcagttattgcatggcaaccccaagtcaactgttgcgaatcttgaaccatctgcaaggatttaaaacggccacctacccataaccaaagcagctcgtgatgatttgttgctgttcttcaccattgatatcctttacaaacacaactggcccagcagctcagctatatatgcagcctccacattccacagttgcacacatccgagcgaggacaccggctggcgatcgagcatatatatgcatgcacttgattctttacaacgactcgcgtacgtaccagtaccatccttttcattactgaattttgctcaacaatcggcgcccgttttggttacgtctcaggatctgtttccagctgcacatgggtaaactgcttcaatctgcggcgccacattattgaagccattggtgaattggtgaggtgaaatgcgcgaaatttcacgagcggccggtcgatctcttggtgaggtgaaagcggtgaaaatctgaaatctcgcgtcagatttgttcactggagctggtggtggtgacaacctactgcaaacgtctgaacctgcaatttaacgtttatgacggccctgcctgagtggctgacacgacgatgaaaaatgaatttaatcatgcatgcatggcttgcatgtacgtacgtactacgtacgtagcaaatctgtattaacatgcatgcattgatggaagccaataaaggatcgatcgataagaaaacatcgagggccagggatgctacgtgaaggcccgaccgttgtttgttgtagcgattaattcgaacttagaagtgtggacatggggccgagacaagatcagaagccgagttaatgattacacaaaggctttgaattacatttttgctattttacttacaatggatttttaggtttctgtctttcaactttcgttcgtaggattttgtatcaaaattcatgttcatgtatatcaagcttacatatatactttgttagatagcatttatatccagttagcatatatttatactcagttacagtgcaccaaaattagattttacactattttttctagatttatgattatttatttttgttatttcatttaaaatgggatatatcattggttaaaatttttgcaagatagtcccttgaaaaaattctgcaagatttaaagttataaatccattaaaagatcaatagatatccctttaattatattgttgagctgatggttatcgtgaattatctatttattgcatggtaaattaaatattatgaaaagtaacttaccaaagaacttaaaataacttaaaataagtggtctaaataatactacagtagaagatttttttttgagaaaacatttttttttcaaatcgtgaagcaagtaatcagttttaataattttatgaatgaggccttgtttagttcccaaaacaaaaacttttcacccatcacatcgaagatatttggacacatgcatggagtattaaatgtggaaaaaatcaattacacagtttgcgtgtaaattgcgagacgaatattttaagtataattgcgccatgatttggtaatgtggtgctacagtgaatatttgccaatgacggattaattaggcttaataaattcatctcactgtttcctagcggaatctgtggtttgttttgttattagactacgtttaatacttcaaatgtgtgtccgtatatccgatgtgataaccaaacccaaaatttttccccaagtggtggtgtttggatgtagggactaaactttagtctttgtcacatagggtgtttgacactaatttagagtattaaacatagactaataataaaaataattgcataaatgagagctaatttacgagatgaattttttaagtctagttaatccataattagcaaatgtttactgtagcatcacatggactaatcatgtattaattaggctcaatagattcgtcttgcgaattagtccaaggtttatagaatatgttttataattaatctatgtttaatactctaaattagtgttcaaacatctcatgtgatagagacttaaaaaaaatttagtccctgagctgaaaagaacggagccgaagtattggactggacccgagatctcctctctgctacatgcttccattcaaatcaatcgtcggtcttttactcccccacagacatgagacacggcgtgccaacttcttttggtaaagagttgggggatggaaatgacgagtgtatgatccctagaaattcttggcgaagactaaagttgggaaaagcggctggcttcatgaggaagtcaccaccacactcccccggcccgctgcgatgggccccgaaagcctcttttggatccggactccggagacgttgtgtgctccgcttgccgcgccgcgaatccgcgtgcacgatcgggtcgctcgcgccacacatctcgccgtgcaacgcacggcggcagtcaccccggcatggtttgggcttgtgccgttgtacgcgcacgccccgcgcgcggaggaaagattcagccgcgtgtgcgtgtgcgcgtgcgcgcgggctgtgccaacgcaccaaccaggcaaccacctcggctcggtggcgccgaacagccgaactgcgggggctcgtgcagtccgcccgatcgaaacgcggccgcgatgcgatccgttattccgtggtgctgtgccgagacgagagggacggtattttcacgtgggctcgtgccatagatatcaacacgcgcggttgggctttacgctgcgtttcgcgcgcggtttggccgggccgtctcgcttagccgcgatgcatgcagagcttccgcctccgagacgaggaacggaggaaggggtggctcgcgtcgcagtttaccatcaacaaataacgcaaacgttaaagaacagggtgtgccaggtaaaacgtgtgtgaattgcagttgcagggtaaacgtgctatatgtattgccaaaaaaaaaaaaagaaatagtacgaattatccctggaactattaaggccgaccgaattatcctcttaaactcaaatacaagatattttacaccctcgattattcataccggacgaattaccccctaacactgttttgagctgttttgactgggagtttgcacacgtggcatcaacgtatcaatccagtcagcaataataataataaatttgtggggtccacctatcatctatttcttctctctcttaatctttcctctcccccgtctctttcccattctcttcagctcggggtaggcgtcggctggacggaggaagcgggagaggtggggctcgagatgggggtggcagactggcataggcgggagaggcgttgctcgggataggggtggcagaggcggctggaggcagggcccgggatggggtggtggccggtggcggaggcaggagaggcgtcgctcaggatagaggtggcggaggcggctcgaggcggggtccgggatagggacaacggctggtggcagaggcatgcaactagaggcgggactcgggaagggggctcgtcggctggtgatggagacgtttggaggctcggttcgaccccctctcttcagcgtttggaatggcggcgatggctggtggcggaggcggtgttcaggatgagagcggcggctgggtcgaggctaggaatgggggcggcgaccagtggcggaggtgagggaggagaggtggtagatcctgtcgccgccgtctcttttgcccgcctctcctgccgctgccactaccacccgcctcttctactcagggtgctacgatgtgggggagggggtggggggaagctgtgcgacgggtggcttcgagtttgctgtggaggcggcgaggtcaacagtgaactccacaacctgagcaccgctgccactaccgaccccgtcttgtcacgccgagcgttgctcggcgcgagtagaggagagagaggacatccaccactagccatgcaggcgtgctccactcgcctccgcaccgccgccgcagggtgctaaaagcaacgttcagcaacgccgctgcctctaggctccaggcctccagcgccctcctcggcgcacccttccgctaaccgtagcgcgctctccccatgatgccgccgctagccggccgccccgagctctcaagcgagcgagagagagagagagagagagagtgtagggggattgggacttgggagagatttggtcgagggagggagatgacaagtgggtccagggagttttttaaattttctttgctgactggattgccatgttggcgccacgtgtacaaactcaagtcaaaaaccgctcagaacagtgctcatgggggttatttgtcgggtttgcatagttgggggtggaggatgtctggttttgttgttcagggggtaattcgatcgactgtgatagttcgcggccgggggggtaattcgtactttttttttaagaaaaaatgaaaatgctatttggattacacgcgcatgtatgtagtaggacgttactaataaagccttaattatagcttgcggttcggctccggcttagtttctgtttctgttttaccattttttattttgttataaaaatggtaaaggaaatggttgaggttattttacgactttttttttcaaatagaacatatatgtatatgttctttttaagagagtggaggtaaatactcactacatttcaacatataatatttttaggttgtttagcaagtactaaggttaattagttgaaaagatttctcttaagttacttcagttttctattttaaaattttgaatggattagattctctttgaagtcattggctctggatttatggaagtgatgtgaatcgtgggaatcaatgtagaaatcctcatattgtggtataaaatttaaataatagaaatatatatattttagaacagaggaagtaatacattagtaattcttctatcactcacattccttgcaaacacatagccattctttacaaaagaataaaagatgatcgatggacaaccctacatggcacgttacatgtatgaaagaactagcacacaatatcatactactccacaacattacagatcaaataaaggaccacgacctgatggactatctggactgccaccacgccggccttgttgcggcactacatatcgatatgacataaaacaagaacaaaaacatcgacatttctacccaacataatttatatatactatcagacataagcatcatcatttcgacccaacataatgtgtatatggattctctactgtacatgtacatgtagtagtagtcactaaacgttaggacctaggtccacatgctcgtgactatagctaccactgcatgagcactattgtagataatccccgtcaatcccgatcgtgtactaacccgtgcagactgcagaaagctatgtcgcgccgcggcaccctgcgccgatctcaatcttttgtcttgggtggtgaaaaacagctgcagattgctctgagcatgctcttcttcactctgttgggatgacgctgcatcgtcggctactgttagaagagctctgataccgattactgaatatgatgaacccaaaactaaactggaaattaattaatgcttcagatggccaaagaaactaagcgagagaacaagagttggatgattgatgcctccaggcagcatctccaatgtcgtcctctttataggcctcgctattgtaacacgaccagaagctttccaaacacgatgtatataaactaggaaaagtacatgaagaaccatgcatagaaaattaacttcagtgacaataatatatgtagaataggtcgcaccaaccatcactccccggtggtggaaaggataaaattggattaatattttaaaattccaaatatcgattttatatattaaaataactttacaaagtctaatagttttataatattaggataatatgataatattttctgagacaaatttacatatattatttctcttatttttaaactaaatatttgaaaattttgttgatgatcgaaaatttagaaatttgacataatcttgtcttaacgttaaggctctcgtttgaaacgtatgaccgaaaaacgcaagaatcgaaatttcatgtttttcaattcaatcctataagaaaatgcaccacaagaaagattgatccaaataaaagttttctaagaaatattatctttttacttatttttctatggaattgaccatgtcttttagttattttcttatgaaattgatcataggaatgaaattctatatatggtaggggataattggcttcaatccaaacaagccctatacttgtgaccgggactaagagcttgaagcgagggaagcgaatggaggagcatgttagtgtgatgagcacttcaataattaatagtactctaattacttatcttaattaatttggaggaatgccggggtccggctagctgcattatattccttaatttattgtcttccatggtatggtatgtaacacgtggtcgaatatgttgtgtgagtacactttaggagtatttcgcaaaagaacactgtgatataaatacgcataaactaggacctggacggtgaatatatactcctgctcctacgtactcggattggttgacttaagcaccgtttacttttgaacactgtaaggtggctagtttaaaatagacaaaattagttctagagcatcgaaagttgtcgattttggttttatagcatcaaaagtttacggctcattttgatagcacctaaagttacctccgttacttctgtttagcattccatccaaactccagttagttttcttttcttattattatttttcaacaaaaaattagatcaaacaccaatggtggccctcttccacttccttctcatctcgaaacagcagtcatacaggagctcaggccggtcagccatggtgcgaacacagtatgctggctccacgagctcgtcatgtaatacgtgagccctcacgagctcatccgcaagccgctgtgttcatccgcgcttgctaggtgtgatctatccacgttctagctttgcccgtacagcgcaatcgtcgatcgatctcgtctgccgcgccgccatggccatgctagagcttgttcaaatcttgcgtgctcaaccaggtccatttcctccgcggccgtgccgcttccgagttcgtccgcgtgcactgccctcggtctcccctagatgcgtcatcctcaagctcatccaatccatgaacgcccgaagtgtcattgtccagctcgtcgccggcattgtcgggtccgcacggaagcaaagccctccaaattattgtcggcgcccttgagctctctccgacatgctgccctcgatcgagctcatccatcggccctcaaattcgccccgaagcaccaccctcgcgctcgttgcgggctcgcctgagtgccgacccgctcctccttgccctggatccgttgtctaccgacccaagagccgccgcctctagcatgccagaaccagctgccaccatccaaggctccaactcgctcagcgctatactgtcatggtcgagctcgcctgatgccttgaagagtggtcaaccataggagggagagcgcaggaggaagaagatagaggtaggatggggtgagccgacggaactgctgacagaatgctaaaaatagtaacggatgtagttttcagtgctattaaagtgaaccataaacttttaatgctatagaatcaaaatcgagaactttcgatgccatagaaccaattttacctttaaaatatcatattcctttttactcaactgtatagtcatttacttaaccgtatcatcttgatataattgtccatatcaatataagctttactacgaaaagaacgtgaaaaaacataagaaaatttcagcgaataattaacgagtcatgtaccctcgattcacgcgacgaaattgaggaaacttggtttgcaagtagctagtacatgcgcaatcgccaaaaggcgcaacctggaccaggtcattgtttcagttaaatgcacttgaacttggcatagggtgtgtttagttcacgccagaattagaagtttggttaaaattggaacgatgtgacggaaaagttaaaagtttatgtgtgtagaaaaattttgatgtgatgaaaaagttaaaaatttaaagaaaaagtttgaaactaaacaagtccttaatcagtttctagtatggtcggcatgcatgcaacaaaacacgacgctgcaaataatacgcgtaaactgggattctgactagctatggagtatgggcagtcttaatttagaagaaaaataaaacaaaggaaggcaagccaagttcgttcccttcacaagcgcacctagcttgggacggttaaaggtagcaactcgcttggaacggttcaactatttttgctgcaaactagtactgcaatgatagatggcaatgattaaggtaataagatgcttcagaacgcacaggcgcagatgctccgtattaggcccggtttagttggaaacaaatttatttcgaggtgttacattggatatacggacacatatttgaagtattaaacgttgtctaataataaaacaaattatagattccgccagaaaactgcgggacgaatttattaagcctagttaattcgtcattagcaaatatttactgtagcaccacattgttaaatcatgacacaattaggcttaaaagattcgtattacaatttaacgcaaactgtataattagtttttatttttatttacatttaggccttgtttagttaccaattttttcttcaaacttccaactttttcatcacatcaaaactttcctacacacataaatttctaacttttttcttcaaacttctaattttggcgtggaactaaacacagttaatactccacacatgtgtccacacatttaatgtgatgggtgaaaagtttttgttttgtgaactaaacatggccatatactagtagagttcaaagtcatgaaataaatcaattaatactatcttcttacctactccttctatcccacgaaaaacgaacctaggactggacgtggcatattttagtatgactctggacagatgtatgtctaaattcatagtactagattgatttttaatgtaacggagggattagacttacaaatgaatcaaaaagttttatagtttcaattcccttaacatacccacccacaaatactactttcctcaccactaaaattatcttgggatgcaagagtttaatttattttaggatggaggaactgcatattaaagcaccactaaaattaccttaggctacgagagtttaatttatttcaggacaaactaaatattaaaaacaagaaaaatatattgcgaggactattatactgtaacatttttactacagtatataaccagagctaccgaagtttgttcgaacaacgatgatttgctcatactatagccttcgcttcatcagcctagagtagggcggagttcaagcaagttcatctgcctagactcaagctcaattaaagctcaagccgagcctacgaaatctttaagctaacagacagtcttagttcgagctatatatatatttgatttgtaagtcttagttaacagacagtcttagttcgagcctactgaactttgattggtaagtagaactatatatatttcaagtataatctttaactaatgtttagttcaccacattgagcggagcgagccgaggggcgtccaaatgatcatatgctcgccggggctgcacacaggggcggagctagagtacattaggggagtgcccaggaacccggttaagaaaattttttaaactataattaatctattttcaccatatatgcatccccttaatacaaacttagacaccacccgcatcagtttaaacttaatctaaagtaaaattaagcaagtagcatcatcccctatttcgtgcgtgcttgctgcgcgacgatttctattcccccgtaaccgtaaggcacaatcgctctcggtcggtgcaactgtgcaagtccgcaagattcggccgccccgccccgccgcgcaacgcaacgcaaatcggcacggttgccgcggtgcgcgcagcgcgcggctggttcgcaaccaagacgccaaccgcgtcgcggattcgcgggcgcggaacaatggcgcgcgtgcatccgtgctagtgaccaagtctcgccgtctcagcccacccgcgaggatccatggttgggctgtgccgagcgggccgtttttctttctcacgcgggctcgtcttagcgataccgccaccctcgctgtttgtgctttcgtctccaagccgtgtaggtatataacaacttaaatgaggagaatatatatatatatgagtatttggattacatgcgttcaaatgaatgtaactaagaccataattatacatagacagacatgactcatccacaccgaccaacaccagcgtacctaatttacaacactaacattagtttcacaagcacggaaagaacaaacccatacttaattagggaaccagtgacatataccaaacgtactccttatcgtgttgagcggcccagattcagctacgtgctttacgcccgtgtatggatcatcataattcataactatgcttccgcgggagcaccgcagaagcagagtaatctgaggatgctcttcagggctccgccgcgctttggcgccggcttgcttcgccgattcgtcgtgtcgtcgccgccgccgccgcgtccgttctccatcagcagctaacaaggaacaacttctacgaactaacacgggtgctctctgtcaagaggagtattggaactgtaactctgcaagcaacaaccgctgccaataagcagagccctgaatgcgtggagtataaatagatagcacggtcgctttctgtccgtacccctgagagcttatactccaaaatggagggacatttcaggcctatttcgggggtaaaaaccagggaaatgcgcactagtgtaaagtgtgactcggatgcagccgtatcgaacggacggacggttctttttttgggaaggaaatgcacttccattttcatctctcaatgaacttttgttttttcaccacaatcacaacggctaaatccacgcaaggcggcgcactatcgatcttgcgtgtgttggctgattgtcgcgcggagaaaaatagggccacgattcgctagcgacattgacgagattgtacgacgttctgcatgtaggatgcgtctaatttcgtcgtcccaggaagcgcgtgtatgtttagggtgggtttagttaacgctaaaattaaaagtttggttaaaattaaaacgatgttatgtaaaagttaaaagtttgtatgtgtagaaaagtttcgatgtgatgaaaaagttaaaagttgaagcaaaagttgagaactaaaccagaccttagcagagtttcacgtctcatgttggaatcttcgaaaatccaacgcatctacgagccttcgacgtaatttacatggaatatatatgtatgtgcctttgcggccgacagggtttgcccccaccaaatcttagcttgggcggttgtttttgtctcttcaggtaagcgtactgcgtacgtcgtccaaggcttcaggttcagcgtcacctcatcatttctcatcagctcgatcacgaccagatcaccaggtacgtgtatggaaatgtttcttcttggatgcaaagccggccggccatgacgccgaaagtacagtagcttgcaagtgtttttcttgattgactgaaactgaatcatactgcatgtacaccctgaaattaacagctctgctgaaagtttaagaacagactctaccacggtcatcttgcatgcaatggaatatttttgtatttcgtgtgatgtttattgtcctgtttagtttatcacgttgtttcgcgttaacaagtttccaaccttgcaaaaaaatagagcaataatttccgcctccacccacccacccctaaccccaccccgaaagatagaacatagtatgtttcctaagcaatacaagttatttaaaaactatccctattacaatagttaagacaaatatatgctctaatcattaatctataaaagttttttttaattatcattccttcctttcctcacccttatgcagcaaaaattactttttatcatgtattccgtacaagctaagggttgatgtaaaatttaacatcagcgtttctctctcctctcctctttctctcttacatgccagtaaatttgcttgcaacttgtcacgccccgaactagtcccgaccggaactagcccgtgacgctccaatttagcctgttaatcgataccagtcccaggaaacagtgctggtatcacagggagacagaatatcacagcaacagaggtctctttattatagagtagaagtacagtcatgttgggctgcggacagatcccgagctcacaactgcattacaaaagggaaacggaagccaggacttggaccaaacacacaggcgtgacttgggaactaggccgaaaccctaaaactcatcgtagccggcttgctcctggaagaactcctcatcagcaggatctgcttcatcttcttcagcaactgggggggatatttatatagagcaagggtgagtacgggagtactcagcaagccatgggaattaagtgtttaatgcaggcttcaagggaaggctgttgtttttgcaattgattttatttgaactcttttctaaaaacaactaagcgagtgcttctcaaacgacacggatgagacagtgcgtctcgtccggtcgaagtatgtgcaatgtatcagtctttagaattaaaacaaggttggcacccggccaacagcttttcaaacggccacccgggccaacaacttttcaaacggccacccgggcctacaacttttcaaacagccacccgggcctagctgatcccatcagctgcagatttttcaaacatcgaaccccttttcacaacagcaatttcacaagcagtagtcaaacaaaactacgctaggaatcacctcacatccgcccatgaccgtgggcacggctgttcgaacagtttgttaacctctgcagagggggtacactttacccacacgacattactaacccgggtcacccagcccgtggggatcagccacgtcgggagacctccaagctttcatgacaaggcatttcgaaagccgacacaggtttgccatatgccgacgagaggggtcccagaccaacaacaggttaggtcccagaccatactgtgccaggaagcccaggggtcctccccgacaccaccccggcgaatccacatgtctctcggcatcaaggctcccctgataagctagttactcagccaggggtgtcccattccacccatgtggtcgtacttgtcttatgtttggatgaaattccaaggaaaacggtccttaagtgcgagagcgggaaaccgtacacccggtacgttccccggtccgcggttttggaaattcatttagttcgcaagcaccgacccaggtgtcgggttttccaaatctttcgtaaaacccaagttttacccaagttgttattcagattataagtttgaaggcgtccgtcgatactcgcacaggatgcacgaatatcaagacgcaactaggtggttacaaggggacatgctgtaacaattaacaaggaaaggatcaaatgcaacaatttaggtaagtccgccaatctgtcttgcagacgggacaaaagattaagtgcgatcctatcaatgcataatatttttcaagcaacataattaaatttcaaatataggctcaagatgttcaaaggtggcttgccttgctagagatctggagcttgatcctcgaaatcctcgcactgcgggtcttcgggctccggaactacacgcgaaacggaacaactcaacaaacggcgaaaataaagccctattaatgacctctaagcgtgccattagatagatctcgagatttgaggaattttggaagttgaacggagtcaaacagatttacggttgggaagatattgaatttctaagattattggatttttggtctaaaggaaaaggatttaattaaatcctttttggaaaagaaaagaaaagaaaagaaaagaaaagagggatggaaatcagacttttcctcgggcggctagggcgctgcccaaggtaaatggagcggctcggccgagcttaacgggccggccggcccaagacggcccaagcgcgcgcgcgggaggggaggggagagagagccggtggaccgggctcaccgcgcgcggtcccgggtgggacccgcttgttagcggctcggctcaccgtgcggagggagtttgcggcgtacgcgcgcgggcggggctgggacgcggtgcacgcgcgcggttcgcggaggaacggatgcggcgggcccatgcgcagcctcacggctcgcggtggaacgcgcgcacgggaggggctgaccggggtcggcccgtcccgacctcggctgagctggcgccgacgtggcgcctacgtggctgccacgcgggccggcgggaggtagacgacgacgccggccggaacggacggcggacaacagcggcgagcggcggagcgaaccacggcgatatcggcgaaagcgagcacaccgggtggttgcacgtgatgaggggagacgagccaacggctcggattcgccggagggagcttgacggcggcgaatcgcggcggcggcaaccggcggcgggaaaaggggaaaacggcgacgaggtcacgaggggccaattcccggcggcgagagcatccacgcggctacgggaatccgatgctagcgtcggattgggcggaactacgccgagcgaggccggcgacgagcgggtgttacggagctcgggcggcgacggcggcgagcacacggcgagcgacggcaacggtcggggcggcgccggctaactacggggagtctactcaagctactaccgaaagctagggggaggagatggagcgaggaggaagaacggagagagacactaccgtgcgggacggggcgcagtgacgagaggccgacggcgcgggagtgatctctccggcctcgggccggggaagaggaagaagagggcgcgcccggagtccccttccgcgtccacgaacgcaccggctctcccggcgcttggcgatggacggcggaggcgaggcagagcacgggagcggcgacaacggtgaggagacgaatgggagaggaaaggaagggagggggaagacgggtttaaaagggcggcaatgtcggtttgagagaggggaaccgacatgggcggtcaagccggcgagctggcgctccggctagcgtccaaagcggcgacaggaggtgacgccggcgagaggggaaaaaggggagaaaaagaggaaaaggagggagagaaagggggctcgcccctttgccgattcgggaaaaggaggagggagcggggcgactcggcagagggagaggggctctctgcctccgccccttggaggctagcgcgcggagtggcgggggccgggcgatgacgacggcgatgatggcggggcggtttggagcggcgcgacgacacgggcgacaggcgcgggctggcgcggcagagggtgacggcggcggcgaccgggcggtcggccactcggcacgcgcgcgtgggaaacaacgggcggcgcggctgggcagcgggaccgggcgacgcggacggcgcagacgacgcggctcgggcgggaaaccacgcgggcgcgcgcgcgagcgacggcgcacggggccggctttgcgagcggggagctcgcgcgagaggagggggcgctcggcgcggctctcgcacgcgcgagtagcgagtcggggggggggaacgcgccggggaaagcgagagagagagagagagagagagagcgcccgggagagagaggagagggccgggggagagggggagatgggccgagcgagattcggcccatcgacctcgggggaggcaaaatagacttttgcggaggaaatgattttggaaggatttggattcggaatttgaactcgacgatagatcggggattgagatcttgagatggcacggacactagacaacaagcaaggaaacaaatttcgcaaatagggtttttaagagataattttcccgctaggcgccacgacggaacgggcgctacacaactaaaagctactccctccgttttaggttataagatgttttaactttggttaaagtcaaactgttttaagtttgacaaagtttatagaaaaaatatagtaacattttcaacccaagacaaatttattatgaaaatatattcaattattgatttgatgaaactaatttagtatttaaatattactatatttataacttagttaaacttgaaataatttgactttgaccaaagtcaaaacatcttgtaatctgaaacggagggagtattaattacacacgctcttctaccatttacattattacatctccgactaattagaggtatgatggtaaagggagagatcttagataatttctttttaattggtgattatggtggaggtcacaagatgatcgccaagaataatagggaaacttttagtgcaggagtcatcttggtaacatggatggtttagaaggaacacatccatggattcttctttttcttttcttttgtttcagcttgtttgaaactttgattgtttggaattggctggagcccaagctcgggtaggcagaccctaaccaaggaaaatatgtagtaaaaaactgttcttggatgtaaaactgcatgcttgaaatttgtccatgtcaccaattgtaaaaattctactctcagtttcaatcatgaaatcatgagtaaaaattttactcggactcttggtgacgtggataaatctcatgcatccatttttacatctaacaataatttttagatttccatcgtatatatggtttatactatattttccctataaccacctataagcattgactcggtcatagtaatagtatacagacatattcaggggacagtggagcgagttgcgagtatagtgaaaacgttcagaaacaagctggtaattctttatcactcaagactcatacaaaacacacaaccacacatacgtatggaacaatacaatcggcgtaaacaactataacctacaagagtacaaatcaaatcaatggaaaactacctgatggactgggacgcacggccactacaccggcctcttattacctctcatgtacacagaacaattctagatctgaacaagatgaataacactacagatcgatgtacatgaagccatgatctcatctcaacctttcgtctttggtggagaaaagcagccgcacagtacgctcagtatgctcttcttcaccccgttgtggtcaggcatcctcgattactctgaaaagagctcgccctctgctgctactgaacctgaacttaactggaataacacttcagatgaacaaatgctagcttagctcagcgagagatcaaagagagctcgatgtctctgaatgtttggtgcctccaacaagccacccatttcgtccttttatagtgctgcgggtaagacgatcagggaagcttaccgagcacatactaggaaaagtacatgaagaaccatggagaacttcagtgatgacaatgtagaacaggtcggcctagctagcaagtgacagttgaagttgggcttggatttttcactttgtgcaacaacttggtttcattttgtataattaactctgttttcttagaatgttctgtgaaaatggtacgtttaattctcctagcttagcctgtgttccgtacttttcaccgtgtagaatattgccttgttccccaagaaccgtaccggcgaacgactcgtaacgtacttatgatgaattgatcaaggtcaagacgtcaagttaatccttgagagtgtctatcagtgtgagcactttgaatattgttatattagctgcacacatagtaccttaatttgttgcatcccatggtatgtatgctagtacgcaacaagcaacaagtggtcgaatacggtgtgacaccgtgacaaccccgtgaaactatgacttggtttctgcatgagtaattgtgaacagcactagcaagctttactcggattgtttgactgaatcatgtacagttcacttttgaacgactcttctcgatctcatgctagctgagggtgaccagttgatatgagaacttctactacagtaaattgtaagtttgcactagtaggtgtgttcggatacccctttttcccagctcatctccctcgttttccatcgcacgtttttcaaactgttaaacggtatgttttttaaaaaaagtttttatacggaagttgcttaaaaaaattaaactaatctatttttttaaaaaaatagcaaatacttaattaatcacgtactaagagcacccgcaatggtaaagtagggtgctctctataaaacatgtacatctcagcaatagactagattaatagtaaaccacctcaatagtatgtctacataggtatctatagctctctcatgcattgcctcgtttttctctatagactatctctaagctagtagatagctttgctctctctctcttcatttaatatcttccaagtaggaaaatatgctgacatggatatcttgtagatagcttatagataaccattgtgggtgccctaatggaccgttctgttttccgtgccagagagcaaacacaccgtagttatcaagcgttactaggaaaacaacatgagaaaaaaccacatgaaaattcagcgaataacgagtcctgtacgttcaccctcgagtaacacgacgaaggaagcttggtccgcacgaagcaggaaaagtacatacggaatccgcaaaaggtgccgcctggaccaggtcattggttacagttaacacgtactcctacactttgaactcccgcttaactagtttgcacttgacatggagtgttcactgaaatatactataattttctagtcaagtagtactagtttttaaagaacaaaaggttgcttatatttcaagcttcatgtagtagctagtagctcgttttatgtgtatattgtgcttgacgagtaaaattgacttaaggctgtgttcagttccacactaaaattagaagtttaaaaaaattagaacgatttaacggaaaagttgaaagtttgtttgtgtagaaaagttcgatgtgacagaaaaattgaaagtctaaagaataaaaagttgaaacctaaacagggccttacaaattgtctttgatacgatacatcgatggtcgatttggttcctgcgtgactacaacttaaacagttgttagggctgtaggatgtaaattcaaatgcccaaatttcaacaggacaccgttagggctgtagcaagactactgtagcatttaatctggaccttcaacggaaaaattggatgactggattgcgtgcaatctctaacgtgcagttatagttgggactgcacgtcagcagatgttcccaatccatcgagtgtgggtgtatgacctgacctgaaactgacctgtcagcaggtttgatgcgttcaccggtcggcatgtatgcagcaacatggtagtgcaaaaagggtacgcgtaaacctggatttcttcggtctcaaaaaagcccaaatgcgaccttaaaaaagaaggccaaatcagccaagctcgatcccttgactgaagcatggacgaccgtttaccttggttagcttggaacggttcaataattgctgctgctaaatatggcaaatgatttactcttaaaaattactgcagatgattaaagcaatcagatgcttactgcaaatgattaaaacaataagatgcttcagaagttcacgcatgttaacttgcgtttcgaacgtcgggcgtgcgatgtgcaagcgtacaatcgtgatatgtggagtagtagcgatgcagtagtaccatggaagaaaaagagtaaacagagtatgggtcggaactcagaaaggggtgcttgaaaacgggaatgctacgcaccggaattccgtccggacgggatccttttatccccttgcttattcaaatagtagcgatacctgaccatgcacgtcctgaacagcagcagcaacctctgcaggacacggtgccgctccagcgcgcgcgcatggctgacataggcagcggcgcccacacccgcactgtcgacgcactgccccgtgatcgtgagctcctcgccggcggcgtcggcaccggcgcaggggaggaggaggacaacacggacgcggcaacagatgaggaagtagagtgcgaaggtgttgccctcaccaccgccgtcggcgcagagcacaacgagcacgtacttggctagctcgtcgaggtggggaaggacgtggccgtcggcgacaagctccgacgcggcgtggacggtggaggatgcggccgtctacgacgagctccgacgtgggacatggatgatgaaggacgcggtcgtcagcgacgagctccatcgtgggacgtggatgacgaaggaagcgtccgccggtgatgagctccgacgtggcgtggacagtgcaggatgcggccgtctacgacgagctccggcgtgggacatggatgacgaaggacacggctgtcggcgacgagctccatcgtgggacgtggatgacgaaggaagcggttgccggtgatgagctccaacgtggcgtagacggtggaggatgcggtcgtcgacgacgagctccggcatggggcgtggatgacggaggacgcggccgccggcgacaagctctgacatggcgtggacggtggaggatgtggctgccagcaacgagctctagcgtgggacatggacggtgggatatctggtaggtatcgtctgatacctcgcaagtatcacattctacgtggtaagaatcgcatgatatctgataggtatcatctgatacctcacaaatatcacctgatacgtggtagaatcacatgatacctgataagtatcacctgatacctgataggtaccatctgatacctcgcaagtatcatctgatacgtggtagaatcgcatgatacctgataggtatcacctgataccggttaggtatcaggatctgatacctcacaagtatcatctgatacgtggtagaatcgcatgatacctggtaggtatcacctgataccggttaggtattaggacatgatacctcgtaagtatcaccctctatgtgataagaatcgcatgatacatgatagatatcatctgatacttctcaagtatcacctgatacgtatgtgatagaaacgcatgatacaggttatgtatcaagacctgatacctaaccggtatcatcccgttcgaaaacgagattccgttatatagcagcccccgcttgaaaactaacccctcttaggacaaaaacacattgtttgaacatattttaagtcacaatatttttaacatatgaattgcatgtatgaaaaatcatatattttgatttgttggatatttagttatcttttatgaaaaaaaagcttcaattgaagactatatcgatgttgaaacgatattttttccaccaaaagtgagtactatttaggtgtccttggaagtaaatttagaggttttatttttttaagataaaggaaactttcttgatggatgtaaacaattataataaagtgatacaattaatctaagatcactcttggcaccagcatagtaggttgtccacaacctataattattttttagaaagaagaacgacatgataacaaatatcatgccatagtgagctacaaccacaagctttatactctatacacgcatcacttagaaaaccttaaaaacaacacctccaaaataaaaattgcattgtcattgccatgatccgatcaacaaaacccaaatcataggttttcatactagagaccaaattcttcgaattctagacaatgccttcaaccagctaatgccatatgtagggaggaaccgattttcgatgagcacagcctgaccgaagttccacattcatattgtcctctcatttcttgttttgtttgagaaattatcttattcttgtgaaaaatctataaaacttctacctatattaagggaaaaaaatcatgccttaccagtctacctaccaattagtaccaatttaagcaatacagtaatatatcgtcggagagtggattttgaactctcgagtgaatgacccatcgttgtttacatgtcactcaaatggttatgaaatttttttgagaagatgtattaacatgtgatatattactccacaaacatgcaagttaaatcaacttttataagttgtaaaaaaacaaactacagataattaaagtatattcatagtcaaatttattttttcgttacgatatgtagaagttaaatttgactttgtatgtttgtgaagtgatatatcacatattaatatattttctcaaattttttcataaccatttgagtaacatacaaacaacaaggagacatcccctcgagagtttaaaatagtttccccgtattacccagtttggaggaaaccagaaatattttaggccatagccatgatacaaggtgaaacggttttatttcagaatctggttacaagagacttgaatttcctttactacaacggaactaaattcaacacgaataaatctacagacaatttaatgaaacaatcaataactttccgacaccttgtaatcacatcaacccctgagcccaacgtccatcagcatgagcaactttattctccttaatatcgtgtgttgcagtctcagttaatcgctcgtctgaggtgatgagcagccgcagaggagctgccagatgctcttcttgacgttgttacgcttggacttccccattcttgctccaggaatatccgagctgcacaagctctaatgctccaaatgaaatgctcctgtaaacaaaggaaccaattgaaaatctcctacaaaattacgcgaagatgaaagaaatatacacagctaaatagcaaaaaggaaccagcagagtaaaaatagaatgctattgtaacctccagttaacttcttcaggaatcaggggatgtcaagcttggtgcatttggtgaatgagagaagctactcctatttataagtgttgcaagactgaactgtacactgcataccttggcttctgaatattgtcggactttgcaagtaaaagttcgcgagaatccacaagaatattcaatgaagaaggactgaatgagtccagaacttgaattctgtccacttgcacaaacttaattcggtggtatttgcccgggattagcttattcaacccttgtttaattgcacctcacctctgcttgttagagacaagtagaggtgaggtgcttgttagaacgagaaatactcaggggtctttcggctagctccacaagatggtgggctagacgacctgggttcaaaacctaaccccttctaattatttgatattaggtccttccctaatttttgagttttttttttttctgcttgttagaacgagtcctagacgtcccaaactgctttaatcactatattagatgcaagcgattagaatgcgcgtaattaatcggattaagtgaatggtttggaacttcatcgatctatgccatgtaaaaagaaaagcattgcgtattccctgggttgcttctactgttacataaagtgtgctgttcgtcgtcctgttgattgaatctttcatctaagaagaattcagacacagccacgggttgcgaaatggcccggatagactctgatgatttgatgggctgcgcgggcccaaaaccatgaaggtcgccatcccttgggcctagtggtagggctttgtctcgcgcggcccagctcgtcggtcgctgttggtctgctacgccaccgatcaaagaagttcacaagcacagttggtttgcagtagcgtactctcgatctgttctaaaataaacaaatctattactcttaatattataaataatatataatatatcttaatactataaatctgttctatcaaatattatgtttttgtttattttaatatgaagaaaagtaggaaactaggaatgtacgtaggggcttttcaactgaagttgaccgaagcatatgtgcataataatttgttgggattattgtattgagaggcattgagcgtttccatccagggcctatagctgtgaagaagaataaaatttgagcatacgattccgctcccgttttgtaaaccgccaacatgcccatggttttggacctttttttgtgccaaccttgcaatcttcaactacaaataaacttggatggaccagttctcaatacgaatgaacaaaacatagtactagtaaattacggcctgtttatagttccctaacaaaaattttgcaccctattgcattgagcgtttgaacacctttataaagtattaaatatagaaaaaaaattaattatacagattgcgactaatttgcgagacgaatcttttaagtctaatcgctccatgatttgataatgtagtgctacagtaaacatttactaataatatattaattagggttaataaattcatctcgctatttactgacggattctgtaattcgtttttttattagtgcttgaacactacatgtgacaccctatataatacccgatgtgacatgctaaaactttacacctctcatctaaacaccccctacagctgctaggcaagtgaaatatctctatgttctggaaccgtacttgtttccatgtcattggccaggaaaacaagaaactgcgtcagaattgagacctggaaacattattggctcctaattaacgcaattgacactgggccacagatcaaagccatacttgtactgagcttggacgaaaatattcttcgtctttccagatgattaaagagccttctggagagagaagcaccatcatggctgcctatctggcgaacggccgatcggccatgtaaaggagaaaaggcagtttgcacaaggaataaaggcaacctagtctacaagttcgctatcaacaggcgatatgtcaccctatttctgttgctgttcaacgacgtccttaaataggagtacttgtgctacaagcctaacccagagatagcaccacaaatacctctcttttctttaggtgtttacttcgacagcttcaccaccttcgtttacccattgccatggcggctgagaagcgaaccattgggctcggcatggactactcgccgtcgagcaaggccgcggcgaagtgggcggtggataacctggtgaaggccggcgaccggatcatcctcgtccatgtccttcccaaaggagcagatgccagccacaaggagctctggaagagcaccggctcacgtatgtaggggcattgcattttttttttcttttgccttttcagtttcttctcttgttcagcaaattctggttcagaaaagattgacaggttttgcatctgatttaccgttggtttttgactttgtgtagctttgattcctctgctggagtttatggagatgaacgtgcaggcgaggtatgggatcaaccccgataaggaggtactggagatcctgcaagctgaatccaagtccaagcaggtaatgattctgcagccttctctgaattcttcatgaattacctgtgatgggactgtaaaaactagaagggaaggttgattcaaatgtaatcaaactaaaaagaaacgttgatccaaatgtaattcaaagcaaaacactgattccatattggctggatcaggttgaagtactggcaaaagtttactggggtgatgcaagggagaaactctgtgaggcagtagacgatctcaaggtgaatacctttgttcttggttgcaggggactaggacccttgaaaaggttagcatttaaacctttttcattctttgatctaaacctcttctcagttaaattgcgtgtgaatcaatggtttttacctcaatgcagggccctacttggaagtgttagcaactatgttgtcaacaatgcaacctgcccggttactgtggtgcgtgcaccaaccgtgtcaaatgcctgattctatgctacatgggactgctggaaattggaatgctgggcttgttttgctgttcatccatcttttagcagagaaccttcatctgagttggtgccattgcaaggattggtctctggctcctgcacttagcttttccatgctattggaatgttattaagttgaatcttcggtgtatttccttctgttacttcctatgtatagttcattactactgtttaatggtgaatgttaaagattgccaatggtgtgcttgctttatgtatacgacaggggccctaagaacagttttttgcttaggcaggtctttgtaacagaaatggcatatctgattttcttttttataaaataaaacaatcttacataagcaaagataatagaaaaggtgcctggcagtacatcaaatgtatataaacctttatttccaaatggcagaaatatatgctttattctttaaatataacaaacagtgttttacattaaccatctgctttgaattttgtcgtacaaattgaggcgaatactctttttagacaatgagatgtctgaaacctctaacaacaatggaagcaattttggagcatagcaatcagaacatcttaccagttccatctttgcgtggaacagattcttcaagatccattctgcgccaactcccactcaaagatgataactcatcaaccttatcatacaaaccaagaagaccacctgtatgtacaaaaagaatttttcgcccttcccacttagctggattagcacccatgtctttcagcattccatatgctgcctttccactgcagaaatatgaagcatatatctttaggcaatgatatggccagtctatcatgaacttgtgatgaccttcaatattagtctaacagaacaaaactttttatacttttcgacaaatggcaagtatactggttgtaaaattagagttacatgcaaaaggtgtttcttgggattaatgtttcaacaaaaggaatatattgtacctgtagactggatcaaggacaatgcctgttgctgtagctatatctttaacaaacttaagctcctcagctgtgttcatggcataacctaagcccttagcctgtgaagcggcagttgcaggtaatcaagtcaaatgttcacaaaattctaccaatgcacattagcaggaaatatcatcaattagagttgcaccataaaattggaacaatgaaatgaataaactagtttcagaacaattatgttatatactgatacgcgcataacaatgtcataattagaggatgtaagtccactcttcaataccatttaaatatcaaatatagaactttaaaaatgtacttacattttcaatgttgactaaatcatgtgaacgcaaatcagaatgaagtccatcaatcaggtcttgaacataggaatggaaatatccaggatcatcacaaacagagaaagcatggacctatcctaaaaatggataattagtcgaacaatttcagcaggatagaaaacaatcaaagaaagtgcatacttttgcctttaagctactcaattttgatcctaaagcaagaccagcaatggttccaccgctgcataaatttaaaaatcattcaagtcataaagcagcaattgctactttcaggaactaggcatgacgcaataacaagtgagtacataagtaccccttaaaagtaaagaatggtgcgtattgacaaaatacctgccacatgcaacaacaatgtcgtcaaactgaacatcacctgatatctgaatttgatgttcaatctcccttattgcttctatatatcccctatcaagaaacaaaacaagttctgatttacaaaaagaaaaaggaaacaatacaagttacaaagataggtcaagtttcaacaatcgggtatcactttcacaaattctgagacctgtttgaactttgaagtgcaaaccttctctttacagtaatcttatattctattcaatgttgttgattaaatgtggatagaatacactacatttgtccttcagctatgctccacttgttagccaccacacaagatagaaccggatcttctagtgttgcatgagatccactagattcagagcctagggccttagacaattccaacattccaggtccaacatagtatattgaccaatagaaatttgccaaaaaaaagtgatgccctaatgtttattcaaatacaaactaatctcttcttttctgatagactgatggcaaacaccaatccatgaataataatagtccctgaggaatattcaaagtatgctataaacgcacaaagaaattgaaaatgcaaaaatggttcaatagttaggattgaacagaaaacaataccaagttcctagagagtttgatccaccaacaggaataacatatggttttcggccttcttccaaaagcttctttttcagcaagtccgctaaagcctgaaccaaataaatccatactaggcttagggacttttaagcaatatcaatatgaataaagaagttctaacaagaaaaagatcactcagatattttaataggcaatgccactttaccagtttatctacatacatattcaaagaataggcaatataatcatgatctttcctcagaatagggaaaaaatgaccatgctaattgtatgatgcagacatatactgcaggatgcattacttgattggacctttagcccctttaataactacttgagtatggatatcaagtatcagtataacaccaaaatataaaaagttcctttgctacacatggcccgatggaattatgaaaataataataaaagcaataatagcacatcatcgaaaagagcataccacactgccaatttttccatattcttcttttgaaacaagatcaatatgcgctcccaccaatctctcaacaaggagattcccaaccaaaccagggtccttatccacaagaagctgaatgtgaacatgccccaccaaaactaggttagcccaaatatgctaccacacgatatcatatcaatttaatgatttaataacctcataagtcataagtacaaagatcaccttggatgtgcgcagtatcagataacaatcaagatttatatactttgcagccactgcggtggcacggcagtgattgctctggatgccacctacagttataacgcagtcagcgccctgcgcgacggcatctgccatcaggaactcgagcttccggaccttgttcccgctcaactgcatgcctgagatgtcgtctcgctgcaatttcccccaaactctcgtgtcagaagccaaactccataaacaaactactctaccctgaatcatatatctattcattgatagagtaaatggaacatattccctgaatcatatcaattcttttcttctttctttttttgcggggctgaatcatatctattcattgatacagcaaactgttgcttatctctaaccttgatccacacctccgtgccattcggcaaattgggcagattccacttgtggatcggcgtcgggaactgtttcaattagaaattaaaccgtgagtttcccggaatcgatcctcctaatcaattcaaaactacttcgaatcgaatccaccgataagaacaagtgcggccgttaggatcaacgatcaagcggtggacttagggaaacaaactcacatggccgagcgagaaggtctgcgagggggcgggggacaggtgcgaggcccaggacggcggcgcgtacggcctcttggagaggaagctcccgatcttcccggcggcggaggcggcggaaactccggccatccacgcggcggcggcggcggcggcgtggaggggaatggggagagagtggggcagcgagcagcgcgtcggggcagcagctacagtccaaaacccacctggtgcctggtgggccccacgcgccatctactgagcagcgggcccctcctcacgtgccccgtgtcagtgagagaaaaggagacgtcgttttgactctttgcccccgtgtccactcgctttctctcctcctggtccttggcgtggaagccacaagaggaagggattaaaaatcaaaaagaaaagaaaaaggaaaggagaagtggaaaaaaaaatagttcgctatctcgctccagtgtccaaatcgcgcacaagttctgaaagcgattgtggttggccgctgttgatcggtgcaatctcccgacgtctcgaggaggaagaagaagaacacgtcgggttagttcgatttctcttcatttttttgttcatttttttctgcgcttttccgcggcgatgtggtagagtgggggagtaggggtttgatgcttccagaggagtcggagaggcgatttttatgggatttttttttgttggcggcggtgcgtgccctcgcgttcagccagggtagccacctcccgccgccgtctgtcttccctgaggtcgccgcctcgttgcttcgagtcctactttgatttggaagccgatgagttcgtggttttcctggaagtaattgaattgttttttttgtatgcgaatctgggtgttagatttggtgaagtgcaatgttttgctggtgtttggtgattttgatgataagatagatgattccactgaagcaatgggggtgtagcaaatgagtggcggcggcgaggatgaatgaaccaatgtttttcccttgattagatgactccaccgccaacctagtgtagcttgctcgctgcagccaggtgccgccattgctcaagctgcttaaggagggcactgacgatgccctggaggctaccacacgcctgccctggctgcttggcttcaatcttcaagggtcaatcgaacctccatcagaggagaacggtagattcagattgaggaagagcacactatttcagtggtattttgagagaaccaaaggctttctattggtatatatcacaatgtgcaagttcaagtgatatatacccctttttatattaaactatttattagttattttctctcttcgttcatctcatacattggagtattggacacaactagtcttaaagttgttgcagctgtatttgctgtctttattggtttgcacttcttagttccaattcagcagtccgtattcagtaatgctataggtttcccttctataacaagtgcaaaatgtctttatctcatttcaggttctctgttctttgggggactcctacagatgtaattggttctgtaagttggggacctaatcaggtgaacacttgattgtgataggcttgtcaccattgttagatatgcagcaggttactgacacaacaggggctgattttgtttggccaatctacatgtggattctctaccgcagagtgtattttcatgctgtatcattctagtggccattataggttaataactttatatttctatctaaggtggttgtttcaaacactggcattcagtaatgtgtttttacattcctgaaaatgttctgaaaattttcgttattgttatgctgacattgtgctacaaatataattccaacatgagtattgatattgattggagtcgttactctctgaagatagataatgttcttttatacaaaagtatgcaaactttcttgcttgtgtcattgaacttgattttctattacaatggatgttgatttcagggttaagaaatgtctgaccaggagagagatgatattcctatgctactaagaaatgttgagctaccaacgtttcctcctagaagtacatcaatgtgcataccagttagggatgatgaatacgaagaagacacatttgtaccccatactggtcctctgtttgttcagccaccaacacaaactgcagcagcgggcattccatttacaaatacaccagatatgcctcctcgacctccacaaggaaaacaagtcaacaagccacatgcgataatgccagaagaaattggaggaaacaggtggtcttatagtgggaatgttccaaagaatgaacatttgatgatgtctggacctttgggacaatgtgacgatcctgattgtgtcaactgccctcctgcttgtaaaaacaaaaggcattttcacagaggatcaagtacattggacagtaaggtggtcttacttccctctttttgtaggaatgcacaaaacattaaaactatatgattttatctgaacctgatagttgtggctggattgcgcaacatttttctagtaaaatagcatagtattgatacatacttcacaatcatcataagtgatctggattcgagaagcctagtacttctgaattataaagtagagaacacaagtctaaaagaaacataaaagataaaaggcaaaaaaaaaaaaacagagtatagaatgcacctctacatagatgagaggtaatattagttgatatttatcttcttcttatataaaaatctcctagtaagcaatcaacatttggctacagataactcaattttaagcatcaaaatttctatttcaatcttcaatggaaaataacagccaatattgctggaggtagcgctgtagcggaagtaccccgctattgttattgcggctgcaattgtggccattgtgaatgctatttagtaccttggttcttagttttttttttgtctagttagatttcttcaacataatgatcaaagcacttcttaagagcgcttaaagttactgactgtggtattgttgtattgaataatctaatctgttttcttttgctctcttgaagttccataattttctttgtgagcatggtggtggatggaagaaggaaattgagcgtttcctttcacgcattccagttatgaacccacatgcaaaagttgttcagcaatggaatcagttctttgtgatatcatgcctggttgccatattcattgacccactatttttcttcctattatcagttcaaaaggtaactagttcacttgaagatgctagttcatatccatctgtcaaaagcctacaactttcttgtacacttcatttgttgttgcaccttgtttgtgagtttgtgagctaatcttgtgtaatttttcttactcctgttgcagcattctattctcctatcggttaactgttctaagtgttgatatcttgtgtaatggattgaaagggtcaaataagcctaaaaggggaggggggaaggaataggcgattaaaacttttaagtagatgcagaagcagtgcttttcggaaattccgaaaatctcagatactccgaagatcaaagctgacctgcacttacttttgttccctttttttttatgcaggataacaagtgcattgtgttgaactggcattttgctacagcacttgcagttgtgagaagcgtgactgatgctatttattttctacacatgcttcttcaggtcagtacatcattgcttttgctattctatagaaggttctataattcatgttccatgatagggtatggttccacattttataaaattctttcataaataacatggtcactaaggcatcagatggaaggcagtttgattatattttggttctttggtatgcatattaggacaagtatatttgttgagtgatcagtagttttcttctaaaaatgccaaattagatactggttttttgtgagtataacttgcactttttatctgttgacaatatgtgagaaaaggctcagccgctcaggttcaatattcttgtgtcctggtatcatgttttagtaactaacagtaatgcattgtttgatcttcagcggatgatttatcatatctccatgatcaaatagttgtgatatctttttaccctttgtttgttaattgtaatggtttgtcatgctttgactccattctggtatcatgttttagtttgatttatcatatcttgtattttattttattttgcatctatttgttcctgtccagttttaaccccaagaaaacatattatcaacttttgaccgttttattttttgcatttctctttcagttcagactggcttatgtagctccagaatcgcgagtagtgggagctggagatttagtagacgagccaaagaaaattgctgtccgttatcttcgtggatattttttactcgacttcttcgttgtgcttccactccctcaggtaacttgttttatccttctgagttgatgtggctaaattttgacattaagcttcatttttcttctttatccctgatggatgacttattatctaggctgaagttttcctttatcattctatttatatttttatattgctttggtactcctcttcaagtcggtagcagaaggcaaacttgttcttagggttatgataattattttttagggtaggtcaaacaaataaaagagttagctactgggaacgcactatacatcctggagagtatgttggagacctggcacaagcagcataggagttaggaggtcccagctatccatccagctgttgaaaattgcttttcttgtttgcttggcttattactttgcatctgccatggctttgtggaccggtggccacaactgaatgcttgcgattggcaagtgctagtgatccatgttcatctttttcatgcacacagcaaattcattgccctatgtagctagtgttatggacctatcatgaacagatcaagagcatttctttcagttctcttcacgtgcacaatagaccacattatccttttaagctataaacttgtgatctccactattgatgtactttaaaatacataagcttcatctaaggagtattggttcaagtccccgttgaaaatatatgctattgaacctttcaggtttattttggtagtttcttgttggtctcagagtatttgccaatgtatttaagccaactagaaattgacaagaagtcaaaaagaagttgctgtttagcattgaaaatactatggatcttgggcatgataatgactaattgattattccatacttgtgaccttagcagattgaggatgagtctcatgaaattgatcatgcagaggaacaccttagctaggctggcaattctttgttactttctgttctgtttgccatcaatattgtcagtatgagcatcatttgatctgattgcactgatgccctttatctatttattgccccagttgcttatgtaaatcagaattgcatttttttctaaccctattaataaaggatattcatcgaaacaatttacacctttttatatcttattggctaatactttttttttgtcttctgttccttgataaaggtgatgatattgctggtcatccctaaatatgttgggttatcaactgcaaactatgctaagaatttactgcgtatcactgttcttcttcagtatgttccccgcatcatcagatttgtaccattgcttggtggtcagtctgactcatctgccaatggattcatattcgagtcagcgtgggctaactttgtgattaaccttctaatgtttgttttggcgggacatgttgttggttcatgttggtacctatttggattgcaggttagttcagcttctatttcagttttctgcacaaaaatattgtgtttattcatgttgaaccagtagtttttcatctggggaaattgatagtgtcacttaaatgttgaaatagggaaaccactcaaatcaacctttgcatccactcaaatattgaaacttaccagtatgccctccctttgtcttcttatttctccattctcctttaccccctcacaaagagcagcagtacgactgttccctctccctcatcattgttgccacctgctcaagcttcatcgtcatcacacacattgcaatggttgacttgtagtgctatctcaacctgctcaagcttcatcgtcatcactcgcctggatttttcacattttggtccttttgaaaaacttatttcgcaaatagacccctgaaaaaacttatcccagaaatggtcctttttggggcgtcagagtggctggcgccgtcatccaacgggacggcgccagcctctctggcgccgtcctcctgccaccgtggcacacgcgaaccgacgtggcaggagcgcccgagggaggggggcgccagcacccccccccccacccctcacctccattcctatttctctgtatggagttgcaacggtgtcaattttgttttattttttcggatgttttttcacacttaggatcacgatacaaccaaatttaaactcgaactaccacttagctaagtctgaaaatagctagcataccacttagtctactttgcaccttcactaaaattagaccatagctcatttagtaaaaccctttgatcagcatgttatacataatgcactctatcactatatgaaattacttaatctaattcaaaatataaccacatgaaatgatagccataagttaaacagtacagagagatgcaattttttaatttttatttcatttttttgatatttttttcacacttaggagaacataggaaccaaccatataaaaaataaactcaaacggacaaaatgtgacttgtagaattttccaaaactctaccgaaacggacaaaatgtcatttattaaaataggcgtaattttctcatacggactcggaatcaggcaaataatatatccatggacatctacagaaaatgttacatccgattctccccagcttcgccgggttcggcgatattaaaacctccaaattccgcttgcaagattgtgttttcgaggagagaagtttctcggtagagctttggaaaattccataggccacatattttgtccatttgagttcattttttatatggttggttcttgtgagttcctaagtgtgaaaaaaatatcagaaaaataaaataaaaataaaaaagttgcacatctctctcctctgcactagttcggagagagaggagaggagaggaaaaattctacaggtcacatattacgtccatttgagttcattttttctatggtgggttcttatgtgtccctaagcgtgaaaaaaaaatatcaaaaaaataaaagaaaaataaaaaaattgggggggggggggggcgccagccactctggcgcgctccccctagctacctcagcatcgccccgccacgtcggcagggggacggcgccagccactctggcgccccaagaaggaccatttctgggataagtttttccaagggtctatttgcgaaataagtttttcaaaaggaccaaaatctgaaaaattcacctcgctactgttgtggccagccatgtcagaggtctcagaattggttgcagactagaggggttttataactcaatggctgatggagcctgtcagagtctaggccaccagaggtggagagcaattgtttggaaactgttggatttttgggatgaagagaaatggtgatagacagtggggtaggcatgcttttcttttcatatggctcgtaatcggcaaagaacaaggaattaaattaagaaatgcattttatggatgcaacactgactcgagtggcattttacaaattccaacaaattgaatgtcatattattaattgtttccttatatttggagaactatgccatgacaatgtgtgctttattattgctttattattgatacggagaaaacatatcttctgtttaatttgttgttttcatttagattgcattttattgtatacatgctgatttccttgtgtttttcgccgggccggcgtaagatacgcggccaaagtttattaagattgagaagaggttcaaactagtacaacagatacagctgccatggaggctaagagctgtacaacctctattgttacaacgatgcacatttgatttccttgtgttaaaaggggtgattgtaaattgctatattcacctgctccttttaagttgttcacgactcctttggtatttttaatagaggacttgatcatatcaagctactcaggagatgttaactaaagtagaggttcatgatgttattattccttttattttcatttgacagagggtcaaccaatgcctacggaatgcttgttctgcatcaaaaattccatcttgtgatggttttatagattgtggacgtggcattaatattgggaagcagaatcaactaagcagacagcagtggtttaatgattcagcctcaacagcttgtttcgacactggagacaacggtttccactatgggatttatgaacaggctgttttgctaactacagaggacaatgctgttaaacgttatatatattcattattttggggtttccaggtatttgacttttgttccttatattcttgtacttaagttgtgtctcatttgttccatttgatgtataaggtttctatacgtgattacagcatccatgctaacactgtacaattttgactaccctttactgatgttattttggtttgacgtcagcaaataagtacgctagctggtaatcttgtcccaagttattttgcatgggaagtcctgtttactatggctattattggtttggggctgttgcttttcgcattacttattgggaacatgcaaaattttctccaagctcttggaagacggtacgtggttatacatgcaaaatttgctagtgtttattgtgcaatattgtctaccttacaatcctgagatggacctctaattgttgtgttaatacacatcaggaattgacacctctatatagatataagctgtaccagctaacagaaaaaatatctagtcctgattctctcttcttctttttttggataggagactagaaatgcaacttaggaggcgtgatgttgaacagtggatgagccatagacgcctgccagaagatttaagaaggttcatctacataacttctaaacaaaattttactaatcttttctttaaaaaataacatcatatattccttaatcttgttgcaaatcgcaaccatttattaattcagactattaatatgttgttgttttttttgctttgtcttactttttattgtttatgtggctcctattattcagaagaagaaaaacgtgtacatattcaacagttatcaggctgcttttcttgataaatcatcttataagtggaatctcatgcaagctatgatctgtgttacagatctcattttgttttgtgggtaaaacgaatgcatgatatattttgaggaaacagatttagtggaaacatcatttgtttgatattgaaatttgtcaatttagttaccaagtttccatatgcagaagatgcacaacagtctcatggcaatgtcaatgagatacctgaattttggtttgctacattcttttaggatcattatttcgaactagtttatttgtgcggaaatcaatttttaactcgcccaaaagggtgcaattttatcttttctttgacaccaaggattgatattgagtatttgccactctaaatgtgcaactaaccaacaatcgctactcagtgtattctgtcgtctttaagaaaaatgagtgtcagtttgtgaaatgttcgaaataggcttttcctctttgcattctcttcttcatctccacaatcttaatcataccagaagttaaagatttgttggagagggagggaatggtaaatctggagtattcctataatgggcaaagaacacaaacttccccaggcagaacatgaacttttacatttgttggagttggcaagcaaatgatttcctctttatttttggactggaagattgtaatacttaatagttttatgaatgtccaggagggttagacgcgcagaaaggttcacctgggcagctacccaaggggtgaatgaagaggagcttttaagtaatttaccagaagatattcaaagggacatacgccgtcatttctttagatttcttaacaaggtttgtttatatgaggactctgactgttctgggagagcaagcactgcaactagttactctatcacatttttactttccatgctcatgatgcatttaaaatttgaggttgctgatgatttacccctacaattttcaaggaaatgctgactacaattattttgcaggtccgattattcacattgatggattggcctatcttggacgctatatgtgacaaactaagacaaaacttgtatattagcggaagtgacatcctttatcaaggtggtccagttgaaaaaatggtcttcatagtgaggggaaagctagaaagcatcagtgcagatggaagcaaagctccgttacatgaaggtgatgtatgtggagaggagctcctgacatggtacttggaacactcttcagctaacagaggtctgcagtttttgcattttgtgtttttattgttttctcttttctgtgatttatatttggtaagtctccatatttctattgtttcagatggtgggagaatgagattccatggtatgcgtttggttgctattcgtactgtaagatgtttaacaaatgttgaagcttttgtactaagggcaagcgatctcgaagaagtaacttcacaattttcacgattcttgcgcaatccacgagtgcagggtgcaatcaggtggagacttttttctttagtgtcacatgatcatatatgctcaccagaataattctctgattcaactagaattgtgtaggcttatgaatggtttatctgttgatttaaattaattttaccataagttagttgggaaaaaactaagggagttcatcatgcatcacagtaattgttattagctgggatatttgggataattagaaactactacggtactctgctccatgcaggtcatgcattcagttgtgtcagttgccgaatatctatcttctatgatatgtatgacaatgttcactaatgctggtgcgctactgttgcaactgcatccaacaggtatgagtcaccctactggagaaccattgctgcaacgcgtattcaagtcgcatggaggtatcggaataggcgattgaagcgagctgggatgtcgaagttgaacgatcaatcttataattctgcattggaacgtggcgcgcgtgaatgtgatgctcgtcagcatgggcgggtatgatttggatcgacaaggtgctaacgtttggtcacatttttatgcgctagagccctgacatccttgtggctatcttacttggcagaatgtattctatgtgagctacataattttttttttgccccacaattagatctggtagctagagtaccaaactggaggaactacatctcatgtatataatgacggctagtttttcactaataactgtttcattcttggcctgaaatcttgcctgcgtatctgctaagcaattgtgttagtttgttggttgcctgcaactggatcagggctcggcaagctgttgcgttaaagacgcttgtctcatggataagctctcgtcgcggcggggtgggaggccgtcggttcgccgttcccgtcgtcggtggagcagattaacggtacgatatgccctgctgcacactgatcgtagggtcatttttagttttgcttccctaccaaaattgtgcatttgcttttctctttctttttttttcacgcgtacgtttggcttttgaaacgacctcaaaccgctgtgttctggggtaaggattaggaaccaattagtgcacgattaattaagtattaacttaaaaaaactttaaaaataagttagtatgattttttaaaacatttcttctatagaatgtttatataaaaaatatataccgttttagcagtttggggaagcttgcccgcgaaaaagaagagccgaagacagcctaaactcatccgagcacaactctctcaataaaaaaaggaaaaagaaacagtaaaaagtgtgcaagcaaacgggccggggacggatgctgcggttgggcctgcctgggagcccgaagtttcttcttcaacgacaccagacgccgggggtcccgctcacactgtcgcttggctcgccgcatctcttccctcctcgcaatcacaagccgagcgggcgggcgcgcggcggagaaaaaaagccgctggcgctgcagctactcacgcgcagccaacaactccaccttgccgtgcattgtactcgtcccaagcaaacagcccgtgctgctctatcagcgcctccaaatttctggttcaggatcgagagatcgccccgccgagcctggcgaacttgaggtacccctggtgtcgcggtgaccacacgccgaaccggttgtaaaccatgattctgcacgcgtacatggtgtcccgtgtacatgtcccgcttcatctccaacacccttctccctttacgcaacgtgccgcacgggcgcgggcactgcccaacgggagctgaaggggcggatccaaagtagaagggctggtatcaggtgacaccgatgactttcgacaaaacatatagcgaaattgtttatccatatgttataacactataatctaagcataattagcatcctatgataccgatagacacgttatgacaccaacgaaacgattctctgaatccaccaccggagcttccagtaactgtgtcgcctccatatatatgctcacattaaggtggtgtttgaatctacttaagatgaagatgaacataaatattaattgtttcacgcaaaacgatgtggtaataacatatgattaattgaattttaattattacaaacttaaaaaatggattaatttcatgttttagaacaactttcgtatagaaagttttcgcacgaaacgaaccgtttagcagtttaaaaagtatatcacttttatcaaaaagtttatctagtttttattggaaaaaagaacagggccttacagttaagcttggtgtggctctcgtgtatgtatatttcctccatccaaaatataagatactttgattaatgtgatatatcatagtacgtattatatgttggaacgaatggagtatacgggaactaggataaagtttgtattggatcggaggtaggaacgttttggaaacgcggataaagtttgtattggatcggaggtaggaacgttttggaaacgctaacgtattcgtattcaactattcaaggtatagtcatgaattgatgcatgcgcggcaaacccttcatgtatagtactagctaaatacccatacattgcaaggaggttgaatatattcttttgttctttttcatagcttgggaatgaatattctgcgtgcttcactgtttattagtggcatcgacatgtcagctgatagtggaagtaagtgatgacagattcatcaatttctagtccccacatgtcagttgtgcgtggtgacgaattcacccctcaccactacgactagagttttaggagtataatatgcaactggtcgtattcagacggttgtatatacacaatgccatgccattaagcaacgggtcgcgcatggtacatctctaactagctccctcgcatacggatttttcactagctgcatattttcccttctattaatctcgtagcgacagagactagactggatgaactaaatcagatactaccttcttttcaaaatgtatgatacattgactttgcatacaacgtttaaccatttgtctcattaaaaaatttaatataagtatgtaaaagtataagttaagattatgttttatttgatgataaaataagttacaacaaaataaataatatttatatatatttttaatcagatgaatggtcaaacgttatgtgaaaaatcaataatatcatatattttgaaataaaggagtactgtattttcatgaaccactgtttcattcttggcttgaagcattgcctgcatccctgctcgcctacatgctggtagctgtgcaaactggtgaccctgcacctcagcacctggatcaggttagagatgcttgtccgttgctacacaagttactcagcttgtgagataacagtgtataccctattgcacgctagcactagtgcattttttttctcagcattgcagctctcaattaacaacaagggtcatgattcatggacacccgaaaagcaaccaaaaaccctactaattttcacaaaaagaacatcactatcgagtcacaactcacaacagctcatcaactgatgataccactaaacagttaggctgagcaatcacagattcacagtttgctggattggaatacgtatgtagtaacaatctttctacttgtcgcggtgatcgtagacatggccgtcgccggcggcggcggcgcggagcacgacgtggcgaatgttgtgtgcacgaactcctcccagccgagccacgatcgatccctccaccgccggatcgaagctcgccgagaacacgccgtacgggacgccgaggaggaggccgaagagcaggaacgccacccagagcggaggctgcaggtcgagtccggtcaccgcggccgccgcgcgcagcgccgcctcgccggcacccgcgccgcgccgtccaccgccacagcacctcctcctccgactcgaggaacgcgagctccccgtcgcgctcccgccgcccgacccacgcctcgtcgctgatcgacgcgtccgccaccagcagcgtcccgaccaggaacgacgcgtgtccgcgtcgatgagtgcccgcaggaactcgccctcctcgccgccgaacacggtcgcctcatcggcgacgccggcgtcgacgaggttcttgaatgattaggcgggggctcaccgctcacaagtgcagcacgccacgggtcaccagacgtgcacgatcttaattaggagtaccatgtaagtatgtttgtcatgttcttcggtccagttgattaacacttagagtcgtgtggtgatgttaagatagtatccgaaatgacctatgggaaagaggaattttacgaacattttagaaacgaactaactcgtgtgaagatttttgtaacgtttcagcgttccaaaggagccctcagctgcgagttgaatgttcttttagcataaaacggtcatgtacaactacaatctctattaatctgaatatatatatctgactacaagtcttaaaccactttactgagtatttcatggtttaatcgaacaaagtgctgtgaaatcgagttaattagtcagtgtcttcatcttctacttcttcctcatcttcgtcttcctcctcctcgtcctcgtcgtcgtccacttcgtcgtctatggaggaatgcttggccatggacagttcgctccagtggctagcggcgagctcccaccccaccagcgagcccctctccgcggcgttccacctcgacgacaggaacccgtagtggaaaccgagcagccccacggcgaacagcacggcggagcccgcggagccggcccaggccggcgccgcgtcgctcgccgcgccgtcaagcaccctcaggaacgcggcctccgccgcgaccgccgccgcgggtggcgccagcatccgccacatcatcccgcgcctcatgtcctccgacaggttgagcccgagcccgagcccgcccgccgcgcgccattcttggcggttcttggcgacgtcccccctcgccgccgccgcagcggtggtgtcgatgacctcgacgttgctggagcttgccaccgccgccggccgggcggtgaacacgccggcgacgcgtcgccggctcggttggtgaagcgggcgtgtggcggcgcctcgagaagggaggagcagcaactccatggccgcggcaggtgaggtccggtggtgcgagtgagtgagtgagaccgtacgtacgtttgtgaagacgagaaatgcgttatcctatcctaaaaggacctttctgggatagcaatgtggagatatttttttgcttagctttgcagtgacctaaccatgtgtcagttggcttggtcactgggtgagcttcacagtcaggccttctttgactttgaaacaaagtattgtgcctataagaaaatttcctgtttggctctttaaaacagatatttgaagcttttgaaatcctataaaagtcatttggaatggttcatgtagacttctagagaaattttctttcagtctttctctctcatctaactctatttttatttgcatcgtctgtccatctatttaaaagaccgtttctatgtttcttatgtgtttttagtattttattgtgtattattcctactaaaatcccttattttaccatttctatgttccataggggtctcaattttatttcatcaagttgaattgtcatttgaacaagtagtacacacaatggcaagctcaaaaaaaaattaaatgaatgatttactggatgttgcctcacaatcataacaatctaatgatgctttcctgaaaattttggagtcaagacaaatctatctctactacgtttgctataaaatgttacactttcaatctctaaattaatgctatatttttactgttcactcccagacgagcccagtcgacccaccagtgcctgaccatattgtcctatctagggattgacccttgaaatcaacggcacagataattcccctgcaaaatcgaacggatcagagtgcatttccttccattaagacataatcaccgattaatcacatgcatgaagctaagataataaggtaggttccccacactccaagtccattctgacacggtttttttgtcccaagcaacgatctcatgcactctctctggctagttgttccattgctgcctccagctagaagccatgcaagaagaggcaactgggcgatcgagctctactacagtggctagctagcttcccctccacatgcagctttgagatctgctagctcatccggatctcctctacgtgctaccatccaaaagcatctaacagacacatcatttttttgccctggccaattttttaaattttcttttttcttcttcttgatctcctgtgttcgttttgtgcctctcgtgatcatgcacaagctgccctacactgtgtctgtgtgtgtgagcgttaatgtgaagacggtttgtacgaatcctatgctatggcgagcgtgctttgatgagcctagaaacattggtagactagagcatgttgttagttactccctccctcccaaaataaatgcagccatggtttttcgtgcccaactttgaccgctcgtcttatttgaaaattttttgaaaaaaaaataagtcacgagtaaagtaccattcatgttgtatcatctcataacaataaaaatactaattataaaaaaatttcaaataagacggacaatcaaagttggacgcagaaacttatggctgcacttgtttcgggacggaggcagtagtagaagaggttatgatcaatgtactgtgagtacttaagtggctaagtactgccttgacactgacatccttcccctgtctgtcccggacaggcagccttgcgtcgcgtcaggctttatccggaatgttgcttccgctttccaggtgataattttgacgcaagtaattgctcgatcgatccgtgtggctgtagtacgtccatggatgtcggatcggagacgattgcacgacgcaaactaaatgcattctgacttcacgaattttttttgtggcttttttgcgtgtgggtgatcgatgaggaacagtgagatcaatgcggttgcattgcacccggcgagagtgcacaacggttttgcatggttttggatcctgggaatgcaaggggatcaatggaatctatcacgggaaattctggtcaagagcagatcatctgcagtgtgatcttccagttcttccacgaagacgccatggaatttgcaattcacagaaaacggaacatggaattcacattcatgattcaccaccaccaccacctgatatgcaccaccatcaccatagaacaaaagaatcttgcagttgaaccgatcgatcgatctcgcgtcgtctagcatggccgcacgaccggcggctcagccaccgccgccgccgccttgggcgccgcggcgacagcggcggcggcggtgttcttcctcggctcggtgcggccgagctggccggcgccgccgcggccgccggtgacgctccgcatccggcccttgccgaggtggtgctcgcagagggagtagccgaccagcgtcggctggctgcagcgccacccgcgcccgttcacgcggctgcaacgtgacccctccatcagcaccgccgggccacgccgcttcttggctccgccgccgccgccgccgtcgttcttggtctcttccttcgcgttcgcggccactggcattgcccggacgacgccgttgacgagacgctctcctgtagtactcctgatcgccggatcaggcttgctgtaatggccattctctaggctgcaaaatgcaagaacatcatcgagtcatctgtcaaccatctgacgaacaagcagctacagcaatgaatccaacccaatgcaatcagagatgcagcaacttatgatgccaaacacaagggaatagttcacgacgctcgcgacgcacatggtccatgtctgccgatcgatcagcatggcttgcacggttgcaccaatgcgatcatggaagaggacaagcaaaaaacaggctgtaagagaggcgatcacacaatcagccatagaacagccatggaagtggccgatcgaagatgccaagatcgagggtgcaagagcagtagtgcgctggatggattagcagtaaagaagccaagaacactagtagcagtagtacatgcctacatgagcagggccgtgtattaaattggttggattgatgtgtgtcatgtgtcaagctggcattgcccagtataaaacagtaaaaaccaagcccagaagatagaaaaagtcccttggatgctttccctttccatttattactaccccccactaccgctaccaccactactactgtcactcacacccacacaaatgacacaaatgacacaagttagcatagcagaggcactttcttgttttgttcctgttccagtttcagttgttcttcacatacctcctgtgaccatctgctgctccctgctgtgcaccaccacggggcctgatcttgctgcattccacaaccgcattgtcctggcaaaatggcatcaatccaagaacatgggggggggggggggttagttagatagatctgggcatccgccataaacgggtgtggtgcaacctatgatgatagtaactagtaacaagaatcattcataatggcaagtttcttgttttctctgtcgttggagcagattgggatcaaagggggtagtgtatacctgcgggaacaacggcaatgccgcggccgcgcgcatcgccgccgacgagtcgtcgtcggcaagatccgcatttgggtgcaagtgcaaccgctccgacttcttctcctcctcatccaccttgtctaccgagagccagtaacgtccatggtttcttggtggaggctggggagcagtggatggatctgaggagggatgcagggaggagagagcctgcagggactgaggccgcctcctgatcctcatggatggatgagagagaaagagagagagaaggggagaaggaggagagagagagagagagagagagagagggagcaatggagatttggggagggtgcaaattaaaggaggggggctttggggtgttggttccttggttttggttggccttttatgcctcatggatggcatttatttatgggaaccagtaagcacaataggagtagattggtggtgcagtttttacactttgcatatttgcgcattgttgccttgattggcttttggccttttgggtttgggttggtttggctttggcctagtaggagatgagatgagatgggtgcacttatcaagactccagaggtggatggatggatggatggatggcgtgagtggtgggatgggtttgtttttgcatgcaatacgccatgtgcattagaactgttgtataggagatgggatggagaggcaggtgagatttgtctagtggacagtattgctatgcgtacaaatgaacaatacatgtgggggaaaaaagaaggtaggtgtacatttctagatctatggtttgtggttttcagttggcatgtcttcgtttgaggttccaaatgggggaggtaaagactgaaagaagacttgtgtgtgaattggtgtgatggatgtcttacaaataaatgtttgcataaaacaattttgtgcatgcgtttttatatccacatggttagccttaactcgtgtccgtatttacgtttaaaactgttcgttgattgtgagtttgattatcttccttaaataacactttatcctagcacacttattatgattatgagggtaactctagtattggttcgacatgtgtggtccatccaagcaaacaaattttcggttagatcgtggcagcgtgaaaattgatttgtgggacccacataaagtcaatctcaatcttacctacatttgccctccctcttgtgtgaccccacaaaaaatatttttaattggttacgatcacttctcttttgaagtcaattttattaatgatatactatagattctcataatatgcgcggttggaacttttggtgcaaggttcaatttcagtcttacattggagttactttgatgtgtatacacagttagtatattattttttgaaaagaaaatgttccataatagtccaatagccattaggatttaagagaaaccaaaacacgcaaagaaaaggatggcaatagcaacttttctctctcttttttttacactgatttctctctctctgtataaagggatcgaaaacatcgttttcaatgggattttttttactatctaatagtttgctaatgttattttcttttctttccaggtaggcggtttatcgcctaatcttgttagaggatcctggtgcatgaagcggggttgcccataatcgtggaattatccatgatgtggaataaatgatactcgcccccttctctgaaatacatgctattcaacacaacggtcgaactccactaacttctattttatgagttatttgtgatacacaacaaaattatgctatcacgaccatactcatttctataggaataacatcgtatatgatatttccatgtgtctaacctaaatattgaattcttgttttttttttaaaaaaaagtcaaatacaacgatgtattcataatcagagcatatagatctagaccactcacatcatgcaccagaaagtataaacacacaggcgtctacgaggcaggtcggcatggccttcagacatggaccatcagatggttcggttctgtgaatcgatatgcagctgatgggcaaccatctgatgggcatttgggacagaatgcgcacatctagatcctgggcgcacgtcctctgtcggcatgcatgtacaggctagtacaggcagcacataatgctccaaaaacccagctagctaaatggactcaccaacagcagactgctaattaatcagacaccacgtcgatcacatgcttgcaaggtagtactagcagtatacccatatatatagtccataccaaacaaaagcttcagtaaattatcggcattaattcattgtccaatcagccagaaaaaggtatgtttcgtcctcatgatccatgtataaacccaaataaaatgcgtatttaatttcataccatctatttaaagaggcgagaaattaaacgatgccatacgacaagggaaaggaccagcaagaatgccagatgcatggtccatgcaaaatcaaggtaaaacaccactagcagacaatagcctgctttctgatttatgtccccaaccaaagcgtaaacaacgtttgctacagactacagtgtagcaactagtacgttcacatcaactgcaagcatttttccccccaaaggcgaaaaaaaattcagacggcaaatgttgtttacgatagcaacttctgaggcttctacctgaatttgcaactcgtctagtagcaatgtgcagaagcgcattctgaagcttctacctgaatctgtgactcgtctagcagcaatgtgcagaagctcatatagtcatattgctacagcctacaggcctaaattggaatatgaattaatgatgagctgtttaacagggggtacttctcaatattcaagagagataacagctgagttgaaaccagaacagaaccatgcagcaaaatagtacctatgcaggatctcatcaaagttgaaactgctatcatattcaggtataacagctgccgtacttgcatctgacagatttaaccgaaacttcagtagtactgaaaaatctgttgtacaatcatattacctgacaaacttacttacaaagaacttaagtacgaatatacacagaacgaaacaccaatcattcaggattcaagagattgaggtgtcaatacaactatttctctatactttaatatatccaagaagaactcaaatgatactacatcaccatgctaagaatgtaaaaggtagtggtcagataacaaaaatggcagggattcttggaagaggatcctatatataccatctcatgtatgctatattgttgttctctgtttctgattaattctagctagacatgaactttacatcataaaatcctatgagcctatacagaatacgtgttggtcgtatatcgactgtcagactgtgactaactgactacttctctctatgaaaggataccaaaatccttaacctcactcatacaaacaacagctcatgtacaggaacaagtaattcaacacacttgcctttattggtgcaacatttgatgctgtttaaccataatctgtgcgtagagaagctcattccaggagtcgggtactccagggaggcaccagtggctgcagtcctgatatatctgaggcgatttcttctcctcctcagtcaacttctgcttgcggtagacagaagggtgtgcctccttcctgtagtcagtcatccttgtgatattcaggtaaacaacaggtgttttcatcccactgagcacgtcctccaggatgctcatcttccgtgggtatggtgtgaggaacttctcatttgttattggctcggtttccttgtcgcaactgcctcctgaattccattggcccccactgcacaatcgaaacacacaataaacatgatgtcagcagctactccgataacatgatattgcacatgatcaaactaaacttgccagaattcagaaaaggttttgccaacctgaaatgggatgatgagtagcctctgaagaacacagttgttttcttgggatttacactggaatcaacccacttggcccaggtaataagagctttctggaaggcatcatcaacattcagctcactgtatacacggttaccctcttggtagtaatctttcctgtgacaggttcaacatactaacagtggtaagcaacacttgaaatgcagaacgcatggcatgcagatcttcagcaaaatcagaaagcaccaattccaacttaccctagagaagttttttcatgagtccaccagtgcccggtattgaagatgatgatatccgcatccttgtacctcgggaaagagttgctgatcatgtcaagcctaagagtttccttggttaaacccttcctgacggggaactcccattcctgaacaaggaaaggggagcggaagaactccacgctgcagttgtagtcctagacaacaggaaatttgcaaatgagcattcattccttatgctgaaattagcgcagatgcaaagcatgagacatgattgaaatgcacaatatacctgaaacaagaaagaataggagccctcggctctgaattgttgcctgcctgacacctcaaagacctttctcttgtccttgacagaattcctcaagatgcaaaccagggattcccacatgttcctgttgagcgaatcaccgacaaacaccagcctcttccccctcagcctctccaacatgtcactcgggttcaatctgttatgaacatcatggaactgaattttcagctgtgtcacatgaaacaccaagaactgaataaaacagagttgctcaagtagtctcaactcaccttggaatgctgcatccgctgggctgccaccggagcctctggtaagcattatcagggcggccattgagcgggcagttgaaggactcatcgatgtgaggacatgatccctcgggatagagagggtatgagtcatctcggacccaatttccatagaacatatcgcagctcgccattgcttcaatccaatgggttttcttcttcttaccaccggcatcgacagcagcctctgtggtgttactagcaatcccctgtggtgtagcatccattgtactattgcttccacctgaagcagcagctctgcttccactcttgttctgatcgagtgcagccggcggatttgggacagtctggttcttgcctggggctcctcctctctgaggcgcagcgccattgccgtccgtggccactgctgcattcccagtcttattgatggatggagcagcagttccattgcttgaatctacgatcgcacttgcaccacctagctggtgagtagacccggcagcatttcttgcattagctttcactgcggtgacatctccagatgaactcgcgatcacgtcggtgccattgatccgatcaggggcaccatctttggtcatcgtgccgtttctggctgaactgcggcttggaactgcagcctcgccggcggaacccgtggtggagttattggctgcggcaccgcctcccgcttgatcattgggcggcgggttgctctgcatcgccgcagtagcgttgccggatggggagttgccgctcggaacacctcccgcattgctgcttgatacttcaactcctcttccctgctcaccggcaacaactgtactggagccattggttcccgcttgcccacccgtcgcggagaacccaccaccaccgctcgatcctcgccgattcgtcgctgctcctccaggaggctccggggaggtggagttggcggggaacagcgaggagaagtagcccgagacctgcgcgcggtagggcgacgcggaggcgaggaggccgtcgaaccacgctgccgccggcgaggagggcggcggcgccggaagcgagggcgcgaaggcgaggaacgccgcgaacgcgccgaaggcgagcgcgaggccgtagaggcacagcctcgcccgtcgcgcgcggccgaccagcgccccgcctccgccgccgaggtagccaacgtgatcggccacgccgctctgcttccacgcgccgcccttcatctgatactgctcgcactcgcgcgcggcggccgcggcgagagctcccgagggtttcgatcgaagcgggagaaggagtaggcggtggcggtggcggtgggggaggagaggaggcgctccgcgggtggagagagtgatctgcggcggaggattttgtaggggaggagacggcggcggcgccggcgcggcgcgcggtggcggcgagcgcgaggtggtgcggcgggttgggagcgaaactaactttcgcgatctttttgggtttggggggatttaaattccgtcgcgttttcgggtttagtaggaacgtgggcgacatgcgcttgagaatcgctcggggaatttgaatttggctgcgctgtcaacagcagggtgtgaaaaaccgccggtaaccgcgcggttaccgcggttaccgcccgtaccgcgggggtacggttacccgtaccgcgcggtacggtttaataaaattcgtccaaattcaaaaatttaaaaaaaaaagaaaaaaatcaaaaaaaatagtgaaggtagtgcttgatttatagtgttttatggtgaagaaatttctcaaaaaagagtaatatttattcaaatttgagagcaaaacggagaataaatttgaaaattggaaaaagaaaaaaaaatgggccggcccgttactgtgcaacccattacacatcgcgcggtaaccgcgccaaaccgcgtggttaccgcgtcaaaccgcgcggtaaccgcgccaaaccgcgcggtttgcccgaatttttgaattcaaatttcgatttgtaaatttgtcgcggttttgcgcggttaccgcggttaccgccggtaaccgccgtaccgccgggtggcggtaaccgggcccccggcggtttttgaaaccctggtcaacagtcaatagacggcgaatctagaggaggattatggcaattttaaataatcatcactgcgataattcacattgctagtgtacgtattttaaaagaatcttacaaacaaatatctcaaccattaaatctaatcaattgctggttataaaaaaattttgtaaggatttcttttagttcgtgtatcattttcctaaataacccccgtgcaatttaggctatgtgaaaaattctagcttaattttacagggaattaaacagcgggatatcaaatttcagctaaaaatgttggttaaataggcttttaatggaactggttagttaaatagtgttcactatatggcaaataccattgatatttcgagatatccatacttacttaaaaaaattaaaaatatttaacaagtcagattaatatgtgatatatcatatatcatttcacaaacatataatatcaaattcgacattcatatattataaaaaaaaggcaaattaactatgaatgtgccaatccatctctggccccctacagtttcatggttttagatgttctagtcctccatttgttctattcattatattttttggctaaattaacgtaaatatataatcccttatattcatagacagagggagaaactactacacgtatattcacaatatttttttacaacatataatttaacttgcatatttgtgaaatcatatattgtaatattccttaccaattttttcataatatgattttttcataactttttagaagacatgtaaagaataagtagatatctctccatgggttaaaatggttcccactacagtggcgttgcaggcttgcgagttgcaatttcagtcaaactaaaactcaacaggcttcttcaaagtttaaatcatggtttccttacataaatcatggtgaagtacagcaagcagcactatgtttgcatggttgacttcctcaaaagggaagaaaagaaacagaaccgaagataagaagataagagtggtacgtttgaatgcagcattatcgcgtgatctgcctccacttggacaatccggggactgaagtgctatttgactgttcattgtttggcaccgccacgtcatctgccgtagtagcactagtgcgaccctgtccgtacgcacttgtacatcatcttctttggcggcctaactagtaaccacccaactcaaccgggtgcaactctgatctgggccgtccatgccaaatctgacgcatgggacgtgatctattgaaatcaatttttttgccataccaaaatgttggcggctttaatagtgtcaaacgactgttaggtcttgtttggtttatttgtgccaaaactaattcaaattctataccatcaaatttggttatgccaaaacttgttggcacaaattggcttcaaaccaaataggctctttatgatcaccatgactacaaactgaagaaggtttgagccattcacaacaggtgcaggcgtgcagcttcagaaataaatcagttagattggatcgtgttgaatgcgccggttaaatgtgaaactccaggtgatctgatctgaagtgatctacttgtgtcgtttaattagcgtgcctaattccaatgggctattagctatgtaagtgcaaaggttagccatgtcgatacatgtatatgtgcacttggaccatccgcacacgcctgaaacctatcaacagattgccgatttctgataggagagggacaagtctgctacactgcctaacttccaagataagattcataaaataaaaccgacgattgcatgcagatcaagttggattcttttcaatttttaataagtttgaaattttcattgcttcgcaaacctgaaaggctgcaaggtgccaactgccaaggtgtccattttcaggtgagtgtctacccaatgacactggggaacagcctaagttccttgactgatcagatgccaactccatgatccagagattaattaattgataattatactattacaacactgtaaagaacgctgcaaagaaagaaagaaaaagattccggcaaaaagtacacggcctgcgaaatagtgaagtcgagcctaacaccacgagacgtgtaagtgtgcaactgaagaagttgcatgatacatagtcgcccgaaaaagaagtgaaatgaactatgacaaatatcgatatttggagagggttaggtactggttcactcgcagttgtagtaggctatctcaagaggattcgatcgtgtcaacaagacatttgcacgtcgcgttgtagcgttggtaaccagctacttcagaggcagtttttttcctctcccttttgaccaactccttgtcatgcacttgtgaactgccgtgcaggtcacatgcctgcgaaaaagagctccactagagactaaagactacagaggctggtcgccactcaccaatgcctgtttttatgtgaaagcaatgagcataaaccttaagatttggcaatggaattgcatgaagaagtcatttgaatcattctttcggtgcatggggcctaatcgtcatcttcttccgtttcttttgagtgatcagattattgttcaccgtagtatcatcataagcaccacgaactaatcgatcatggccaattgacgacgacgagcaacattacgccgggagttcctttccaacccaaaaaaagcttttacgaatttcggcttttcgtaatgcccatttttttccgaacggtcaaacaggttacttgacgttatattaatagaaggagattaagctcattgagctctagcataaatccttgatgagaattgaggccggcttaagtggatcccagcatagtagtactagtactagaacaggaggagaaacagtaacattggaaagggaagatccatggagtacgggttaagcaagggtccgtgccttttttatggcttttaatttctgctgctgcttactgcgggaccaatcaaaggcgtaacaagcatgccggtgaaagccacgcatcctgcatcctgcatgcagctatgcgaggacgtcagttcgtacacaaaagcagcagcagcaacggattgaaagtgttccgtcgtgtaaaggagtaaagaagcatgattcgtacgtatacagcagtagagtacgtacctgtacgattagattagattactgaagcgtcgcaactcgcaagtggtgtacgaggatcttgaattcttgatgagatcttttagttttaggtgcggctactcctaactcaacggtgcagagtcatggctgttcggttcgagcatggctggctatccagcagtttaggcagctttggctgggcgaagtgtgtgatgtgtcgaccgatcgatgaactgagttcgcatcatgtcagctgtcgatcgagtgtccatctgccattgatgaactgcagcaaggagttgagtgaatgcgtgtctagatagatggtcatcaggccagaaacatgtaaattcgatggtcaggccagcaacatgtgaattctgaacactgaatctgaactcccatccgtttcagaaaaatcagaagtacgctttcagaaaaatcagaactacgcgacgtgaggaacgcaggcattaattcctttagagcccattgcctacttttgggcctccggaactaagattgggccgtcggggagacttgcgccgcatgtgacgcagctcgaaggaataagtccattttccccatatcattacatcaagtttaattcgcatccctagaccataacaccaaccacaacttacaaaaccgggttaaattttatcctccgatattacatatagctggtttttactggattggaaagtgacctagtccactagtgttgactaggcgtttagcaaaaataaaaatgagtccacatgtcattctcactcgccttccctcttctctctttccaccctcttttctcaatatctcctcccctcatattaaactatccaaacaccgtaggaatggcgaaagattagcgtgccatgtcatcattttttccaaaaaaacaccccgttcttctggttaatcatgtttgagttccacctaccctagcgctgttcaattctgtgttgggatcgatccagccatccacctgggctacggtgccggctcttccaccaccatcagatcaataagaggacaacagacagtcaagatcttcccaacatatccccacacagccaaaaccctagcaacactcacggcccgcacgcatatggctcatccgccgcggcgccgccacactgccgtagccctcacgcacgtggagggcgacacatcggcgcacaccgccggctctccgcctcgcacaacggagcgagggcgtggtgtgcgtgcccgccggccgccgctagctccccacttcacgcccctctctttgcctcgccttctcttcttcccactcttctcgtgctctcgccggcttttctcctccgtcgtcgttggcccatcgatggtagttcgtccccaatcaagtgccattgtggcaacgtctatacaaagcatcatctcgacggtctgcgagcttgagctcgagatgcggtgtttccccatctcatgcgaatcatttgggccttgtgaatctcaactcccgaagtgtccagggtgaatgagtgtatccgtctccatcgtcagcctgctgatactcagacaatgctgatctaccatccctcctttcaaggtgaacacctatgcccaccttctcttccagtcctgtttcttctactttatcctcactctgtcattccctatttacatgaatatcattttgttcagtttcgtagttcaggtcaacattcatgacttcgacaaacagtctgccaccttcatcagctcagccactggggccatcaccatctcctacatcatgtagctactgatctgtaccatctttatccatcattaaaatttggctacaggaggatcgatttctgaatattttctaaacttggctgcaggaggatatgcacaatgtgctttgtacagagggatcgtgatctaggtgtttgcaaagagcatgcgtgagggtaacatatgttttcataacaaaaatatgttgcaattgtacataaatagtcatatcattcaaatgagacatttcaaatcgcaggctatataccattagaggagctcttacagacaatgcacagacaatatagtatttcaagcatcaggtaggctttcagtcatttacgaattagcatttttctttgtgtgtttgctctcagtacccacttggttcttcatgtagattctagacgatttaggtttggcactaatagaactagactttcagttaaatggatgatttatatgcaggaagatccaatttgcttgataccctattatctgtgtaccattttcagtacttttgttgtacgactgttatacctatcctgacaatgttatagatcattggatcaaatggactagatccttctttacacttttaattctcttagctggtagatcattgaatggttaatatggtcaattataggttgtatgctaacatggtgtatatttgtctgcaggattttttttcttccctttacccatcatcattctctgcggtgaggtattgttttttatttctattttactcatccaggccttctgcaataactattttgatgaaacaattgtagtttccacaattatattcagctctttgtcttttaaaactgaattactagctgtgagctcagaatagcaaagtatttgttgtcgaaaatagagatgatttcctacagcccactaaggagtgatagcaggatagatgtggctcttatgtattatggtgattcaccttgaactaaaaaaaatatttgtctagacaattaatgcctcctatttgcatcaatgaatagtcagtttaaatgcattgggtatattcgcccagttcattgtattgccagttgtttctgaatgttacttatttagtttttcaaaatatgtagagtaaatgacaccatagtgaaaattttccaattcaaccatatgctcatccattttcttcccttaaacgtggaaaacacttttactggcagttgcacttcaaagttttagcgagaaaagttatttcagtatctcaacttggccgttccttttcaccatatagttgatagcttgatattatagagagataacagaactcgccaaaagcgttataattttgattgaatgcaagataactgtagtatacttccctatgggattgtaaaattcatcattgcttaatctgtcaaccttcaaatcattgtcatcggcaagcatagactaatcttcttttgttttactgttataggactactagggagggagtttctgcggtaatatatgcaacaccaagcatatccgatatacttcccgtcagtgcaggagagtagtttagaggttgcataagtgcatgtcattgctggagtgtaccagtataaaatgtgctgaaattatttcgtagctaataaagtaaatttacaaccttttgtttatacgggttactggtaattagtaagtctctctgacgtgttccggctgttatgcttaattccatgtccagtttgtagttctgttggaccttcaagcaattatatattggttgttcggtgacatcttcaaccggcgcagcgtagcgcgccactatttctagtttctctgaaacacgatgcattgagcacaccgatagagagcagtgatcgggaggtgtgactgatgccggcgtggtgatcaggaggtgtgactgacaaggaagtagctcagggtaaggaggttcggtgcggcgcgtggcctgcttagcggcatacaaggacaaacctgagcaagaacaacctattggagcaagggcaccctactcggagcgggggctgccgaatcagagaagccatggttgtcatccaggctgggccctcccttctcgccttctcccccgagctaccaaggagcgacaaagaggtgtcgggccaggtcgccaccgcatatgtgatgcggagcgcatctcgctcatggaggaagatcaggaatttgcgggcaagctgggcagcgtgaaacagtttgatacggaaactaggatatggcgatggcaccactgcttgagcttgagttccgccgctaccgtcgtagcaccccttcctcatctctgccttcctccgccatcactgatagccgcgaccccatcctttccagcccgctcaccatcaccgtcgtcttcttgtggatggcaagtgagctcgagcttgctggctccttctccttcaccatcgtggactactcgaaccccctccgccaccaccgttgccgcttcccatggatgggctggccaaccgctgcccctctccctgctaatgagctcctgaaaaagagaggggatatgtggagagatggggaagggatgggataggtgaggagatccggaagttcacttacatgtaggttccacatgttttcaaattttctttttactgattaggatgccacgttagtcaaaacagtcattcatattgtcctacgacattactcgggcagcttttgttaggatgggagtgaatatttttaatattgcgatatactccctccgtttcagattataagactttctagcattgtccatattcatatagatgttaatgaatttagacacacatatatatctagtttctttaacatatatatgaaggtggataatgctagaaagtcttataatatgaaacggaggaagtagtgataccaactaaactcgaaaagatgaggggcggcaagtagacttatttccgctggaatatgctaccggatggtgctaagcccatgcagagaaacttgaccgagtcgcactaaaaaggaataagttcacttcatgacccttaaaagagacccgaatctaatccatgaccctaaaccgcaaaaccggatatcttcacccccaaactattgaaaccggtgcaatttgactcccttggtggttttggatggcggtttcgctgacgtggcgctgacgtggcagtgttgacctagtctgtgtgctgacgtggcgctgaggtggcatttcaattaaaaacatatatgtgggacccatttggcattcacacacacaagattgtggggcccactaacatgtgggccccacctgtcatctcttccctttcttcttcctctcgaacctcccctcctcctcccttctctctttttgttctacctctccacttcgggcgtctgcggggagcgagcggcggtgggcggggtctgaagcgacgcgaccggtgggagctgaagcggcggcggcggcggcgtcgagagctagctggagcggcggcggccggagctagctggagcagcggcggcggcggtgggctggagttggcagcgtggggcgtgggccggattggtggcggtcggcgagagctgaagcggcggcgagctagagctacgcgagagaggacgacagcgccgacgccgacgagatcgagcggggggacggtggtctatgggccggctacagcttcggatccatccgcatcgccgggatcagagctcctcgtcgccttcctccaacacctccctgcatccatcctcgcatcgcgcgggacgtcgacggcggcggcgggcgcgggatgtcgacggcggcgggcgcgggacgtcgacggcggaggcatcgagcgggttgagcggcggctccggcggcgtgcgggcgagcgcgagtgcgggaggaggcaccggcggcggcaggtgcaggacgtcgacggcggcggcgggcgcgggacgtcgacggcggaggcatcgagcgggtcgagcggcagggctccggcggtgtgcgggcgagcacgagtgcgggaggaggcaccggcagcgacaacatgagctcggcggctccgcttctcccctctcccttccggccctcacgcgccaccgccgcctctcgtgtaacccaccacctccgttcctccctcacctgctctcctctcctctcctctctccacttggcaaggctgatggcgaggctaccgccgccgccgccgctgccgctgctctggcccacccgccgccgctccagctccagccgcccgtgctccctcgcggccagccaaaggggagaaaagagaaagagaaagaaagagagaagggaggaggaagaaagggagagagaggatgacatgtggggcccacatgtcagtgggccccacaattttttattgtgtgtgaatgactaatgggtcccacgcatatttttttttctaatgtcacctaagtgccatgtcaacgccacgtggaaagaagaccgagtcaatactgccacgtcagcgccacgtcagcgaagccgtcatccaaaaccaccaagggagtcaaattgcaccggtttcaatagtttggggggtgaagatatccggttttacggtttagggtcatgaattagattggtcacttttgagggtcctgaagtgaacttattcccactaaaaaatctcgagatatttccgcgatccggtagggcccagtcgcccagacgccaacgcttttgtcccttcctaccccacctcgccgtcgccgcgcgctccacccctcctctcctctcctctcctctcctctctacgcaagcgcagcaatacggataagctcaggcttcccgccgccgccactgccacgaacagttcgctcaccgcctcaccggatcgccgccgccgaccaacgcgcagcgcgggcgccgcgtccccgaacaatggcgctcatagcgccgagcccccgggtgctgcgcgcgcgcgaggcgcccgccgcaggcgccctgcagccacccgcggctgcatgctcgaccgtcgctggcggtggcggggcggcggggaggccgctcgggatgtggagcggtggcgggggcgggggcggggggaaggggaggaggagggagagaggggatgggatgttgagggcggaggcctacttctgggacgtgtcgaagccggtggagatggaggagatcgactccatggagaagctcgacgacgcgctccggtggtccgtcgagaacaagcagcccatcatcatcgactggtatgatccgcttttgcctttccctgtttcatttttctgatttactacgtgagcatccctgattttgccagcccatgaattctctctgaattcagcaattagaactgcgcttgagtgttacagagttcttagattcgctaggaatcgacctgggattctgcgaccaatgtagcatcgtgttagtttctgaaagttatcattctcttcagaaagtttctgaagataccatgaagtgaaaaagttttgttggaataccccgtttgtcaggttcaaattgcaacgggagtgtcacaagtttaactaaaagacatgtgattcctttcgaattgaagctttttgttaaaaatttgtatcggtggaagttccatgatgaatgttgatttcgaaatgggtgactggctggaatggcccacttggcccacttagtcttaagaaatgtgctaaaataattcatttggacccacctgaacgacttgtgattgttccatggacttgtgaggagtgtgatcaataattgagatgttgttgagatgaatgtctattttctttatcagaatgctagtcttcaaccattccctaaagaaatgcttccgcagatgctgaggttctcttaaattgttcttgccaggatggctagttggtgtcggaaatgcatatatctgaagcccagactggagaagatagcaggagaatttccagggttggtttaaatttcatcaaatgtttgtatgtagggctgacacaattgacaatatgaattcaatcaagttatagaggacagccttgcggggtatggactgtgagtgtcccattgcttcactcgaattaaaatggtatttctcatttcttttgtagagtcaggttctactttgtcgatgtcaacaaagttccacagactgtggtgaaaagagggaatataactgtgagtcagcaaattttgagcttgtcttttttttttctgtattaactgttgattcagagtgactccaatacttatcttattcattctcaatttctgtctttccacgtgtttggatgcacttctatcttcagaaaatgcccactatccaggtaactccacacttccttcacagttcattgtccatataccaaaatttgtaaatatctctcattctgcttaatataacaccagcaattgctggctttggtttcaaaaaaaaaaaaaccaaaatttgatcttagagttctcgttcatgttcagttatggaaggatggagaatgggcagcggaagtgataggaggccataaagcatggcttgtgatggatgaggttagggaaatgatccagaagcacaagtgactaactacctaaatcaagcaattgatatatactgtaaatagagatttgagatgatctcttcagatattaagttgtaacgagatcaataattaaagcaatattctctaatatattgacgtgcaattcttttgtgcgttcgcgaaaaaaaaataaagcaatattccagctcctactagtgcaaactctcaatccaatacttcgtactgtatagtataatactcctgtattagcatgtacataagaacttcagatttacgccatctgaatagtatacttccaatttacagattgaggaaagcagacaaattgtaaagaatcaaataatccaccattcagtattaacttaattcaatccacatatctacaagatccactctaataatctgcctctttcagagcccagttcccaaattttccatttccattaatcacaaaccaaaccaacccatgataattcaggtttcttcagagtaaccaaactagcacctagctggccagagcccagaagctagcactaaccgcttcaattaatcctcgcggcggctagcccagcggcgcgacaaggtcggcgacggcgaggacgacggcgacggccagggctcgtcggtgccgacggggacgtcggagagcggcgcgaggaagcgcctgacgctcatggaccgcatcgaccggaagctcatggacgacctcagcttgccgtccttggagaagacgctcgacgagctgcggaggatgaggtagaccagcgcctgcaccagcacgaacacggcaaccttcgtcaccgcgtcgcggatctccggcgagatcatcaagctcgtcgcctcgccgtccatggcgaacagaaggatcaaagcttgtgtgtttacgtgtatgcgcgtttgagccgtgtgggagagatcgatcaaagcttgtgtgtttggtcatctcggtctccgctttgctcgctttatatagactcgagccggactgcatgttgtttcggattttcttggtcgtgtacgcaagcggtgaagtgtagtatttttgtttttgttttttgtttttcttggtgggggatagcttcgttcatttgattggttggatttgctttgcaaggaaggaggtggcgagctgcctgcgagcctgaaactgtggaaaatttgtgtgtctgcgatttggtcgatttttttttattgtcgcgtttagtttgtctgatgcggcgtcgtttatgctttggtgtttgattattgggcttgatgacatcggttgtgtctggagatgcggctgctaagagtgcttggatggcttggataagttgtcatctgaagaaaggggaagcaaaggtgacatgcacgctgacatggcgtcctgaatctagataatgacctatcgcgtctacttgttttaaagtaatcactttcttgggatcaaagcagtggtttactggtttataatatacagacgtaattaccaaattagatcgagcacgtttcgtttgctgcaagccttggtcgattaatcaacatttcttcgtaaacggaaattctttactgaatgtttatacagttatgtcacattaatccttgctagattttctttttccttaatgaaacagaaaagactgtaccaatattaatccagtggcatagagtaaattctcctattcccggttgcattctctcgttccactatcttccctcctcttttctgcaagggtttgagtgcgcttcttgccatcatctccattgacactctccttcccagcctcgatacctttctctcctaacctacggtttccgcgcctgaccctttttccgcgcttgcagttgcagctacatcctggaacacgtagataagatgaacacgtagtagcacttgtgtttgaccctgtcactgtacctaattttcgccgcggaagatcccacccagaatattttgaaacaaacatcaaccgctgaaattgacccaaatcatccagaaaacaacagttggaagagaaaagtgatgaacttttggtcgaggcgtttcatactttcatctaatcaaaatttatcttctcttctagatgcatacttggactgtccagaatgcaaccgaattccaagccagatgtcacaatcttctagccgttttaccttttttttttcgccagaaacttctttggactcggcattccatgtgccaattcgattgggttcgatttctcaggaggaaatagcaggaggaaccgaggaacgtgcatgcatgtaattcatttaatttcattcctgccgaattatcatcaccggcatgaagtccggcaccgactagtagccagttgacagcttaattagaatcagagacagctagctcaggagttccagctagctttgaaccttgactcggtttgcaatggcgaggttagccaggcaaatgtgcgatggccggagtgggtcaaggcctctctcaataatggtcagccagcctcggcacagcttgacttgtgggaagagatgcgctagatgctataaacgcttgaaccgtgcacacgtgcagaacgtttgtgttcggtgtttacatacacggtgccggtgcccatgttatcaatcagcaaggttctacacttctaccgtagaagaataactaaagaaatcagtattatgcattgcatgagataaagagagttcatgaaacagagcaaaataatatttactagtaggcgtgcaaaacggaaccgtgattacctaaaatgacttgttttagagtcgagatcctcgacttgtagtccaaaacagcaccaggctcagcacaagcaagcaagcggaagccagagaagcagcatcacttccatgcaggattcattgtactcatgagtgaacagggtgaaaaaaaatatcacaatatcacgtccagtttgcgcgatgtatcgcaagcaaaaggagccaatgcaaccaagtcatgcattacaacccaactagacaggcctacgagcttaggtgtgttttcgtatgacaaaacttattacaacgcgcaaggtcctagtatcccggtctcttccaaaaaactactagctgctatctctaaaagcagggcaactgttagcacatgcggtttcacttcttgacctcctcgtactcagcctctggagcctgctcgcctccgccctgagatcctcctgtctctgaaccgcctgcgccaccaccaccaccagacatatgctgcccaatctttgaaacagccttgttggccgcttcgatattggccttgatcttctcgatgtcatctgaggtcatcacagagcggagatcggcgattgctgtctcaatctcagtggcaacctctgcaggaatcttgtccctgtactctcccagacttttctcaacgctgtaaatggtagtgtcagcgttgtttctgatgtcaatgagggctttccgctcctgatccttctgagagtgaagctcagcctcctggaccatcttctgaatctcagcttctgagaggccaccggaggatcggatggtgatttgctgctccttcccggtagacttgtcttttgcagagaccgtcacaattccattggcatcgatgtcaaatgtgacctcgatctgtggcatacctcttggcgctggtggaatgccaacaagatcaaactcaccaagaagcttgttgtctgtcgccatctcacgctcaccttgcaagacacgaatgcccacttgtgtctggttgtcagcagcagtggagaacacctgcagaatgcatggagtaaattaaggaggtcaaacatatgaaatggaaaccccttgaaagaggtggcaagcaatctatcactacagatagaagaacaaggtcctggcagataaaatcaaacagcaaggtcaagaataagtacgtagctaaaaagcaggaagttagtatatcatgtaatgcatgatataagagtattcatggatcaatcacaaaataatccatgataaagaacagagcaacactatgtaatctactactataccacaatatgaaaatacaaacaaaatttaatcacgtgacaatgaactagatgctaggtcattaaccattgggatgcttgctaacctgacttttcttcgtggggattgtagtgttccggttaatcagtctggtgaagataccaccaagagtctcgataccaagtgaaaggggggtcacatcaaggagaagcagctcctttacatctccacggagaataccaccctgtatggctgcacccatggctacagcttcatctgggttgacccctttgcttggggacttgccaaaaatctctgaaacaatttcctgcacttttggaactcttgtcattccaccaacaagaaggacctcatcaacctccttggtagttataccagcatccttcaagcaattcttgcatggctctctggtcctctcgatgaggctattcaccaaagattcaaactttgatcttgtaagtgtaatgttcaaatgtttagctccagaagcatcagctgtgatgaatggaaggttaatctcggtctgggcagtcgatgagagttcaattttagccttctcagcagcttcacgtaacctctgcagagccagcctgtcctttgccagatcaatagcttcactcctcttgaattcactcaccaagaactccaaaagagtgttatcaaagtcttctcctcccagaaaagtgtcaccatttgttgctttgacctgacaagaagataatcagtgaatcagcaggaaaaaggaatattatgtaactacattttctttgtacataaagttactagttagcatcagtgtgtagttcataaatactgacctcgaacaccccattggagatttcaagaattgagacatcaaaggtacctcctcccaggtcaaacacagctatcaaaccctccttgttgtttgttccataagacaaagcagcagcagttggttcattgatgatcctctggacatcaagtccagcaatgcgaccagcatccttggttgcctgacgctgagcatcattaaaataagctggaactgtaatcacggcctttgaaacagttttaccaaggtaagattcagcagtctccttcatcttggtcaaaacaaatgcgccaatctgacttggtgagtactgcttgccatctgttgtttccacccaagcatcaccatttggagccttcacaattttgtatggtaccattttcatctctttctgtgtttgtggatcctcaaagcgtctcccaatcagacgttttgtgccaaagaaagtgttttgtgggttggtcactgcttgacgcttggctggagttccaacaagtcgctctcccttctgattaaaggccacaactgatggtgttgtcctggtgccttctgaattctctatcactttggggttctgcaatcattaacttgttaaatcaaataaactgacaagcaaagctggaagtgaagcgatgaacgaagaatctacaggatcacccacctttccctccataacagaaacacaagaattagttgttcccaaatcaattccaataacctcgtttccagttggttttacactgggcaaaaaaaccatgaagatgttagagcatgctgcatacatattagctagattgtgtgtaaactgagattagaccattacctgaaagctcttgcaaaactaccccattgtgaacaaatattcgcagaatatgccgattgagcattggcggtcaactgaaaggtgtacaagtttcataaatatcgagaaggtaaaatgtaaaatgctaaacatagcttaagattgaatctgcaatccttcgtatagtctatgtgtacagatctagagtaatcttgaaacaagaaggggaattattaatctaggtgacactgggagtgtaaaacaaaatagtactcttcaaacagcaagagaaaataaaactacttatatgcatgagcaagacaaaagaggcagacctatatgtttcagtttcagggttaacttaacccaggtcccagagtggttctggtttatcactgaaagatattacaggccatccttttttggggccatccctttttggggagaagacccaccaaacacaatgtgtaaacacaatatgttgacagagataagaaaccgcatgttgaacaaactaaattgacaggatagaagatgatatagaaatactaacacagagctccacgtaggttcggatagaagatgaaatagaaatactaacacagagctccacgtaggttcggttcaattcatactacggaaacaaacagaacgctatctggccaagtggccataagctttagacaaacaaagctccagttcttccattagtgtattggcatgattgcatgaagctccaactgaatcgtagtacttacaaaagtgtcttatgtaagtatgcaagaagtgcagcaatcacacccggacactcaggacgttacaatcttgtgcctcctagcttaaggaacatgaagagaggcgatccccttcttgacgaatgaccaagaaaatcaactaccttaccccaccctcccatcgtcctctactcaccatgctaaattatacacgatctaacatttcaaaaggagaatggcacacggatccaatccataccaccggcagtaaggaaaaaaaatcataatttgaatttgcacctagataacatatccctcatctaatctaaaacaacatagcgaaaaggtcaaccagtatgacatatcagataggtagctgcaagccagcaagagatagcaagacgtcaacagctagtagaggaatccaccgtgaaaaaaagtaaccacagccacatgagaacccaaccaaggacactaatcagccacccatggctcgatccgggcagatccaagcaaaagaaaccgcaggcgaggaccaaatcgcgctatcacagatcgccgcatcaaatcaaacgcgcgagggaggcagattagggaacgggaggcggagagggggcgtaccgttccgaggggcgaggcgaggtctcgccggcgggcggctcggagaagcagcgacgccgccatggccggacggggaggggaggggaggggagggaggcgaggaggggtttagggttttggttttggcgtgtggaggcgtgaacttattggggattgggggaactttggggagaggcgtggcttgcggaggagggtggggattggttgttgggctgctgcctgctgggatggatgtatggctgggcggtggggcgccacgtcgtcgcggcttgcgggtggtgcggatgcgggtggccgtgtgtgtgtgtggaaccttctcgaatcgcatgggatagcgtggcctgcgcacgaatgggccggcctggtagggggtggatcggttgggataagtccatctattgttccttgtctgtacgtcgagtctttacttgtaatccttaaaccacaatatcgaaaatctttacccttcattttaacaaaacttttcaaatcatgttttatggcagtatatggatggtttggctgttgtgacatcctagtcaacaaagcagcagcacaagctcaacggttgagactaggaggaggcaaacgctgatgggggaatcggacaccagcctgccgatctagcgcggagagcacctctatctcctcggaggggggtgctactgcgcgcgttcgtgccagcaatttagctgccccccccccccccccgccgcccgccccgtttattttttcctgttcgcattttttttcccgattttgacgttctcttttttttcgccgtttctttccgatttttttttcaatcacctctttacaaatgtagaattgaaagtttttaattttaagttgaaagattttaaatcttgacctgaaagttttcaaatctgggttgaaagttttaattatcggttgaaaattttcaaatctaggttgaaagtttttcaaatttgagatgaaaagttaaaagttttcgaattaaagttgaaagtcttaatttagaatatagtcttaaattatatttggaaagtcaaataaaacaaccgaacgctaatacagaggggaaaaaatctaaactaatcacgatactaatcacgtttcctaatacaacctaattacctaaactagcgctaatcatgacgttaattattttttaattctgattttaaccctatgcgtaacgacgcgtggtctccccaggcgaaaaaaagcaaaaaaaaaaaaaaaggaaacgatggactgtcgtgtgagggtttgggccgcgtgcaagggatgggcaagaaacacgcgcaacataagcttacgcgtgtgtacgcgcgaattaggaaaaccgctcctcggatctcttctctaggcagggatcctatcgagctcgcaatggcggcggccagcctcgctagtctccatgtctgccttgtacctctgcgcccagagcatggctaacgatgagagcaacaaaacgaggcatacgatccaggagcgcagcacggatttttttgcaatcgttatttcttgcctctgtcatatcacggaaacctttcgatttggaacggggagagatggctgagtggactaaagcggcggattgctaatccgttgtacaatttttttgtaccgagggttcgaatccctctctttccgccccaccgcctccttagacatgaatgcggagaggaagaggacaaggggtgaaggcttggaaggccaagaaggtgcagtagagggacgcatctccttgcaagtgccatcgaggcaggcctcccacagcacaacgtggcaggcgagtaggtcctccttgagccacttcaagatatgctaagcggcgtcgaaaacgccaaggtacacggcgcccttggtcgcgcggtccctccctgcattgcccccccccccccctccattttcactgaacccaaacaccaggagcgttcctatggtggagttgttcaggccggagcgacaccgcttgcatgataataacgattgaaacttgaggtctagcccagagagggcctagagggcatgttctccccatcgttggcatgctctgttgacctcgcgtgcgtggttgaggaaaaagagcgtggttgaggaaaaagagtagagaaagaagtaggagctgatacgtgggctcaacatatttttttcttctcacttacatgtgagctccgtatgttatttcttaaaaaaattctttttatcaactagaatgccacatcagcggaatcagttgtctgtactgccctggacctgtcttggacggttctggcaatacaaggggtgaagatttataatatcgatttttgggatgccaattaaactcaacgtgaagatgagggacagctggacttattccgctttggttttttgctggccttatgctttggcccagctcagcccgagaaggcacctagaacgctagacgtctggttgttcccctataagccgctggatcaagatggacgatccagattgaggcttgaaagcaggcaattctcgatatgcacactaggctctctaatgtttcattactatacttgcacaatggactgctgattttgccttttctttttggccggacaatgtggcctactaaagcaaaagtcatgtacacaggtggatttgacttcatagttgcatctctatccgacactgccgtgtcgatgaaactaagagtttctgaacatcaaacatggcgcactataatgtggacaagcagcagctacccttcacctctagcaaaagacaaaaacatcaaacatccatttactttggtactaagctccagcctccaaggcctccagcagtccagcctccaagccctcaccttggtctgagagtgttcttgggggcactaatccatggcgtccctgcgacggcgaacctccatggtgcagcaacatgctccggcgatgcgtattcgatgcctacacgggggccaaccaaaatgttctccggttctggcccgtctagtacctccaacccacctaagacatgtaatgtcaggcgaaaacatgttgatacgatctggcagttttgaacgatgttggagatcactgaatcataccaggtgtgtacagaggatggttggaccagtcagtggaaagccccagagcttgaccaacctgaataacacattcagagacagttataattcagttgtgtgggaacagtgatgatgcagaatacaaaacttggtattgaaaggcataaacctttcctggtccagtgagtagaagtggcttatcagtctgctggcctcgacgctgctgaatagttgccagccctacagtattttgcaagacaatgagaaaagatgccatcaagctcaaactagatgttacacaatagaatttacaggaggaacagacatttggcagtaactagtaacctgactgggtttttcttacatgaccaaatgcagatgatttatataagctctatggtctaagcatatagttgcttttgtaaaattggaactccagtagtccaaacaaagaaacagattttactttctgaagttaggagggacagacggaagaaaaacaattgccgaaacatgtgaggaaagattatcgcatatcctcttcctcttgctcacacagcaacgtcctcgtaaacttcccttgtgttctttaagtaaaacatattctctaatgcatacttcatatcacattaagtctgaagtgaaacatacatttcagaagtgaaaattattgcgattacagtatatatcttccgatctaaactaaacaagcaccaaacgaaactgcagccgaggtttataaactgtaagtcacccaaataacttggtcatgttcacttgttgttacttcaggaaaaaagctgatcagatcatacatgatgctccataatgctcaaaatacttgagagaaatcagaaatgcatactgctcaaaatacttgagagaaatcggaaatgcataccactaacgggagcacatgaccgaatcagaacagcagctccaactccctccttgtcagcgacgacattgagcatcatgtgcagtccatagcacaggtaaacatacgcatgccctcctgatccaaactacaccggatgaaggaaaacttcagcccacattgaagttcaagagactccccccaaatttgctaagcttatcgaagaatttaaggcaagagaagcatcggccttaccacaggagcagtcctcgccgtgatgccgaaccggccgtggcacgcggagtcatttggcctgtaagcctccacctggaggaacacgcaggaacaaatccacagtaatcgcacttggccgcagtgattactgattagtaggagtggtaaggtgaaagaacaagcacctcggtgatgcggaggacgacttcgtcgcggcgcagcagcttgccgaggaggcgtggggcgaggtcaagcgcgtccacctcgaagaaatcgcgcggcaatgcgggcccaaacggcgactgcaacgacaccgccgtacacgccgggtgcggtggtttccccgcggcgatggtctctccggcggcgacgcggcgggtacggggctgccgcttcttcctgtggggggatcgcttgaagcgtgggggcgtgggcgccccggaggtggtggtggtggtcatcggagatggccggctccctccggcgaccggcggcggcggtggcgtgggggtgtgtgcgtggggatggacggtgcagatggaaggaagggatttcatcgatggattggcaatacactacgagtactactgaactcaccggcccacgcgattagtatttacaaaaaaaaaaaaaagtcaacgattagactatggctgtgttcggattcatattacgcacggaaaacggaacgattcattagcacgtgattaattaaatattatcaaaaatagattaatttgattttttaaacaactttcgtatagaaacttttttaaaaaaacgtattgtttagcagtttgaaaagcgtgcgcgcggaaaacgccgaacacacccatatgtgtttttttaaaaaaacaaatggttgacagtttggaaataaatattacacttcaccattttattgtactctatctgtcctaaaatataagaatctataattggataggatatttcctaatactaggaatttagacaggccttatctggtcctatgtttttatattttgggactgatcaggtattgtatttgagttcatatttattagaggcatccatatcggttgcatatgtaaggtttacatttttaaagggtacgtcaagagaaaagcattcgagattagtctctaacaaaagttagaatggtcacccttttttttccattgctgatctctaccgattaggcatgaataatgtatcacggtgacaagtgaccatggtaatctatgtgggagaatctacatcataaaatatggtgaaaccttggaatctcagagagatacgtagggatgtcactagggttattgcactgtcatgcacacctctataagcatctatctttcttcctcattcgtttaggttagaaaaaaaatatgttagtagaaaaacgtattgacttatgttagccatttatgtctgatacccatgagttgtcacgtgtgatgtggctatttcgcagttagcaagaaaaacattgaagaatatagatgttggataatgtttgactatcaaaggggataccattgcctttacaataaactagcaataccagtgctaaatgagacatctatatgttgttgacccaataaaatttctactagagttagattacttgatgaaatttgaaactactttaccactcgtaacaaataattaaatatttctttgaactttgatggtctaacaaataatcccttgctaatactacctccgtaaaaaaaaaagtgcagttatggtttcccgtgtccaacgtttggccgtccgtattacttgaaaaaaatatggtcaatatttttattgttattagatgttaaaacatgaataatattttatatgtgactattttttaaaaaaaaactaaataaaatagacggtcacaactgtaattatattgggtcggagttagtatttgccaccatcttcattggctccgagatcgccatccaataatttggtggagacaattgaacaactcgtacggatgctccatcgatttctgtgtaccctgtatagcgagtgatagtgcctccatccatccacaggtgaccgtccgttcctagcctcggcccgtagagtgtcgacttggtggacagcacaaactcggtgtcaataatggtcttgggtgatggcccttgacctccatctccatggcgagtggtcgtcgtcgtaggaggactcagcaggttcaggttctcgttggacacaatcacatgcctcggccgcatccacaacggcattgatattgtgcagagcccgatgtttagctccaccattgctcttgccgcgctagcttctgcgtcatatgttggccctatggttccttcgcttgatgggggtgatggatatagagcgacctaattgattcgagcgatagttagcatagttagtgtctgttcataagcaattcattatttagataaaaaatatcattctcataatttacttgtttaatgtggtaggtgttaacactcttctctacaaaacatagcgaaactaatcttttatattttagaacggagtttttcttcttaaaaatatatatgggagtttaattcttttttatttacagaacttttggagagattcatatatatatatatatatatatatatatatatatatatatatatatatatatatatatacacataaataaattaatacatacctcgataatttcgggtttgatgaaacatattggaagagcgaggtggagaggcggaaccgcaaagtagagcccgtgttttgcctcttcctgcctatggaccgcgatcgcgacgctgtcttcgtccctgaagacaatcaccgtgttgtctagtatcacgcacaaggtgatcgcctcgatggcgccgaacgccaccatgtccgcctgcaggtcatcgagtttctggaaaataaaatcgagaccttgggccagaacgcatcgacgatggaggctgtgcatatccccaccctcggagatcagctggctcgtgatgggtaccaagagatctcgcgccagtgttgccctctcgacgatgtcaccgtgcagatcgcgtaggtttcccaaagagaccatgattgttactatttggcttggaattttcgaggctggagctgaattatacgtatgaattttgggcgaatacgaatatctctcgctagcctagacgcaataatacggcggctgaagtacgattgagatttgagagaggctctgatgaatatataagattttgtggccgaatacgaatacctctcggcctgtcgctggcctagtcgatggtagcagtcgggctgggcccgctcaggaagaggaaaacgagtcagaatcagacacggggttgggggctccatttagcccacgtgaaattgtttggcccatgctggcgaacataattgggcctcgggctcgggctgctcgcacgtgcagcgcgcgtgcgctgcggagtgcttcgtcgtgccatctcgcatcgcaccccagaccagaccatggcggcggcggcgctctgctccgcctccccggccatctccacggcggcagctctcggcgacggcgtggccacgctccgcctcgcggtcctactgcgccttcgcctctccaccgcgggctgtgggctgtggctgcggtggggaccccatcctggcaggcgcgtcggcggcttccacgactacggaggaagagggatcaggtgttagagatgatgatcccgacggcttcctccgctccgagaaggtcaggcttaaaaatcggctttaggtgaaaggagcccgtgaatttgcacagtagagatgtttgtacactctcccacactgatgtatgtacattttttgctggactagtgctgtgtgtttgcctatttactctgatacggtgcataagtgcatccgtctacaataagataatactatccttttagatgattacgtgccctataagtgtccagttacccccctcgatggcaggaagggaagataaaaacacaacagagtttgaatgtgctgagcatttcaaatataatgaaatgacaggttgctagaagcttagaagtgaaaatatatatcactgtatgtctgtatcaggcatatggtttctgctagtaatcttctagcattgaaaaatcaaatctgtttagtgctcaatggtagctcttggacgagatgatcttagctgttcaagcacaatgaaatctacaatgttaattgctaaatgaactagtagtagacaccgtatattatgaatgacggcattgagagattaaaactatttactgctactgttgtccttagacaaaacactttatgaactgcaatataacctcaagtactatggttgaatatgataaagttggtcttaaattgtgctagtaataaattacacatacattcgagtctctattgtttttcaagtttagctctggttacctgtttcaggtaaacgttgagcataaaagattcgattttgtttctgttccaggatcgaaagtgcggtatctgaagagtcacatgatgaccgcacagagaatgaacatattatacatgaccatgaacaccgtcatcaccatcatcatcatgagttcatgaccatgaacacaaacatggtaagtataaatgttgagacatgatcataatcactgtcatgatcctcaccaattatcattttgagaactcctgctaaactgaaaagtagtcgacgacaactactgaagacaggctaaccttagtagcaatatatccatgcctgaactgtgtaggcattcttatctgtttatatgaatcattagttcattactgcttgaagcttgatgctacttttctattaccatgtgaatagtccaaaaataatgattgttcattttctgatacacatcatatggtaacacccttttccttatggtaatattatactaccttagtagcaatataactggctttctgttccacaatcacataatgtactacattaacacctaaaatctcacatcaaggagcatgatggcatgtacgaggtttgcgcacactgcacactcacacacaatcttagatccatatggtcccttcgtccagtacctattcttttaggagttagctcatggaaacatttcataattaccgggaggctgggagttgagccatctgcattgtattatttcactcaatttcagaaagcataatatgatgactatcttaagtcatggcaatgctttccatatcttaagtgaaaatatattaatatcattcggaagtttttgaactgtttataccattgtctgcttttgtaaaattttaaatatgctagccccccatgatatgaagaacaggtaaactcattgtttttcttttccttatagatcatcatgcacacgagcatacccatgatcctggtgtttcttctgtaagcattgtttgcaaaggggagatggatcttgaaaaggttgattctaaatttatctgtcatgctctatttagtcattattgctacatgaaattttacatctaaatactatcacccatttaattgccccacacatgatggggttgtggatattgaaataagtggataacaattttacatgctctcacataagctggcatgtggttgggaaacctactgctagaatgtctttcaggtttatgttaaacttagcctgtagttttacatagttcactattgattcttccatcgtagtctcttactgggacatttacacaatgaaccaattactctatatgtgttcttatgtaagaaatgtctgtgttccttgggcagggatactctatatgtgttcttatgtaagaaatgtctgtgttccttgggcagggagtgcacatcattttccggggaagaataatgtgggaaccaaatgagccatgcatcaacaagattgtattcatagtcaataatctcaaatggggaagaactggagaaacggcttcaaagattgcctactctactgaaggaataagcgagaaacgggactccaacaggtggtgtatacttcaatccaaccaatcaaccacatgaaagtgcagcagcctaaagcaactaatataaggaggaggtgatcagtctaatgttttcatgtacacagcctgaaagcaagaagaatgcatgaatgggctggctatccgctgaggtcaaggagatggtccgtagaggctccggagccgggccaacttatctacaatgacagctgcaatgaagtcatgagtgtaggcggcgtatggcacccgtctgcagtcggtgaaccccaagctgtaccagtcctcagccggcctccgtcccagccttgctgccccatgccaagacttgaacacggccactgcgaccccccttcagacgggcgtggactagatcatccatcgcaccaaaggtggtggacagccgagcctccagatctgcgcggtccgtgtacattgggatacctgagaggatcaaggacctgtccgggaagctgctgctccagacggtagcagggttcgcgagagcacacagcgcgatgagcttgtgcacgatccgtctggcctcgaccaccctgttcacatggtatcctggtcctggagacatcaactcgtcggatagccagttcttggcttggcagtaggccacgggacccgcccagtccctcgtgctgaagctgagctgctgcggcggctgctgcggcggcggcgtcaggaaccgggaaacgtgcagccatgtcatcatcagacagtgaggagaaagcccccatctcatctcatcatcatcatcatcatcaccccatctcatcccaggagcgtgcagccatgtctcgggaggctcctgcagcagaagctcgacatcctccggactcccgagcacgaccaccacgacacccatggccctgtggatcacgacggcctccacctggtgcctcagctccacccggtgctccagccagtcggcgatctgggccgcgtcacactgccaccgctctgtgcccagccctctcagcagaatcacccggctcctgtactcttcctgctgcgccgccgccgcctgcgtgatcacgtacggcggaagcaggagacggagcaaggacgacgtgccaccctcgtccgggagcagcagcgaggaggagtccagcatccggaggcccgtcctgacgagcaaccgcggcgccctcctggcaaccaactccgtggcgtccgcgtcgtcgtacacgagcacgccggcgtccccgcccctccacgccaccacggcgcacgcgtactcggccccggcgaggtggtctctcgccgcgcggcaaagaccgtaggctcctccaccaccaccatcggacgtgccagcgacgcggacgacgaagacgcacctcaggtggagatccgcgtcctcgtcgtccagcaggtaccgaggcggcacgagcgaccggaggagcccaggctcgggctcagcagtggtcctccgcctctccgcctcatcgtccagtgcgtccaagatgtatccgcgcgggtcgccgcgtccgctcgcctgaacaaatccacattcacattgtcacggagtactagctagtagtagtagtagtagtaattagttcacaaaatgtaactagcctggcaacatcatctcggctaattgagttgtttactgattcatttcttgtgtaataaaaagcgcagaatcatgccttgaatcctattaaaaagaaagattcaaacaacgcaaagcattgtcctatcgagttttggtgattttgctcttagcggacaggatgcattgggtaaccgatttcgtccaaaccttcaataaaaggctacaattctaggagagagctcatctgctcatgtatcattctccaaatacacgtgaaccagaagcactgagcagaaaacattatcgcacagacagcaggaaacaaactcgcatagacagagcgggatgcagagattcagagaaaacaaactcgcacagacacagcagaaaacaaacacaaactcaccgccggaatgcaggcgacgtagaagcccgggcgaggcgtcaggttcatcgcgctcgcgctgtctgcggcatccgcgaacaccaccagcccgacgcggtagcccgtcgagctgtctcgaactaagaccgcggcttccacagccaggacggagaagctctctcgcaggtcccgggggcttgtgctgggcgccacgccgtccacgagaaccgatctctccaggaagtctgggtcatcaagaaccccgggagcaacatagtaaagatcagagataaggcgattcatctgcctaaatgctgtgttgctcgcctgcaccaaacaagggacagcatccgatccatgtcaaatcaagcacaagactgaatggaagaagaagaagaacacgacaggtgtaggggggggggacgggaagccatgaattcggggcaaaatcaagaatccagcggcaagagaagcaaaatggcgccgaattcagagaagactcggcgttcacgcgaaagaaacgagaaaatgcgaatcatcaagaaatctgagaccatgaattcaagaaacgggaaaagaaaaatcaggaagcggaggcgagggacagaatcgaacagcaaaagaagcgacgaattcaagaaacgggaaaataaaaatcaagaagcggaggcgaggagaccgaatcgagcagcaacagaatggaccatgattcccttctagaaacgggaaatgaaaaatcaagaagtggaggcaaggaaacagaatcgagcagcaacagaagggaccatgattcccttcaagaaacgggtaaagaaaaaaaaatcaagaagcggaggcgaggcgacagaatcgagcagcaagatcaactacaagacaagtagcaaatggtggttgccgaattcagagaagacgccgccgaacacgcgaaacaagaaaggggaacgaacagaacaaatcagagaccacgaaatcgtcgaagaacacgagcaaacagcaaacaacccttccttacctctcttgccagccatagcctggcgaggctggggtggcgaaccgggatgataccagcgggaggaagaggagcggccatttccgccgatcggtgcgggtcagaggagaggatgaccgggggatggagggagctctgctctgctcgtttggtttcttggagggagaaaacgcaggcaggtgcagggagaagaccgcgctcaacgctggtttgggaggagacgtgattttgtttcagctcacctccgcgaaggcggtggatggaattggaattgggctttggaagatttggcccatttttgtgtggcccgttattctaaggggacgatcagttattaggccgaaagaacgaggaattttaagcagaataagttcaccagccgtctctcaactttacatcgaagttgtttcacatcccttagagcaagtataattgtgagttatcgtaggaccgagatatcgactagaggggagtgaatagacgatttaaaaactaaatgacacctaatcaaaactaacctaagttgctagactcggtgagggttaagtctaactaagcaactaagttatgtttgcaaacctagggtgatagtggctcaattaattctctaggaaagtaaatcacactcctatatcaatgttttgcaatcctagggtgatatgatatcaagaatgtctctaggaatgtaaattgcacaaatataaatgcgacaatcaaatgagacaaggagacaagagatttttcaccgaggttcggaaactcgccggtttcctactccccgttgaggcgagcccaactccaccgctcaaccacgaagccaccgcacgcccccttcgtcaaggggtgggcaaggcgggagccggcccatggagaggactacccaagcctcgatcactcggggtagttcttccttcactctgaaggtggtgaactccaaaccactcacaaccggcgccgggcctcctccacaatcttctcggagaggtcaccgggcaacttctccacaagccgtctaggaggcggcaacctccaagagtaacaagcaatgacccggcatggaaatgatcaatcaagtgccgcactagctctacaaatggaagtaatgcacttgactcttggctagaacaatctcaatcactacaatggatgaacactaagctcaaaggtgtgtgagagaggtgcaatgggtgtatgcaattgaattgggtgccaagagagcccccttactgctggaggagagtatttatactcccaccaaccaaaactagccgttgggggcgaaatcccccaactctgtgtactgccgttctgaccggaggtatgtggccggtcagaccgtgctactctgcaacggctagaaaactagccgttgtagccctgtcagagggccccatcggcctggccggtcagagcgacatggggtggccggtcagaccggcctcggctcggtcagacagccctcagctcggtctgaccgaatacggctccgtcggctctgtatcggccaccccgagcaccaccataccggcctccagggggccggtctgaccgcacaagtgccgtcggttagaccgaccttgtgcgctggtcagaccgcccgcttggggccggtcagactgccacaaggtggccggtctgaccgcccctggtcaggacgaaaaccagtgaatgcaaggtgttgtgtgtgttgtgtgaaatgtgagcacaagtctaaatgcataatgacctaatgtggcaattaaaatcttctctttgctaggtcattactcctcttaatagtacgacgaaactaaaaataaactagcaaatttgatcgccctacacctcgatcaattcaaaactaaagcacttgttttaccgtcttctttccctttgctttgcgccctcaattttaatccatcgataatcatctatgcgcacatctgacgtggatctaacttaaaatatatagctcaaaaacaacggttagtccacaattagtgcttgttattaattaccaaaattaacaacgggggcctagatacttcagctataaaccttctataagcttatgtagaggagagatataacaaaaaattaagggtgttggctgtcatgcaagagctagcttaacataagctccaaggtaaatacaattaatgtataagtgagagatagagagaggagaagaaaattatagccaaccttatagctaatctattatatgtgttggctttaagattggctaatagtaagaagtgagctctattattatccttgctcttatctctaataaaaaatcttcacctctaaactataaaaaaccgtgcaatttgggtccgttagcagtatggatatccggtttcgctgaggtggcatcctagtcaggaaaaaaaaagacccacatgtaagtgagaaggaaaagaaaatgtgaggtttgcataagaaagttacttaaaaaaaatcacattactccatctattatattattaagacagctcgaaaagaagccaccacgttcgctgtggaagctagaaattcccacattaatcgaagaaaaagaaaataagagtccaagtagaaatacaaactaaaaaataactgaaattcggaattaaaaataagcaatactgaaataggagtccatataagaacccaatacgagattaattaaaacctttggcaattctagattttaactgtttatagtagaaaagataagtctatagatctgtactgtgtacgttacatactaggagtctttgtccttttctatttctttggcggtgtacacagtacacgtataatctaattcaattacaaacctatacggagaagagttgtgctgccaaataaacaaagcttgcactgctgcacctatatattctgtagatttcaagcagcaacgattgggctagagcggcagaacccaatgatagcgggagccgaccatagtaaaaagacatgatatttacatagacattacaacaaacagatcaatacttgcaaccggcaatgcatcaaacaccaaaagtttctttgatgtttatgaaagtacaaatgatatcgacatattgtaattagtgtatatttttcacaggagatgagttagtgcaagccgctataaactgacagtcagattaaacgtttagattatagtggattcacaatttaacgttcataatttaacggttgagatataacacctatatataaatataggaattagagttgtagtgctaatacaggagtacaaagcgcgctgctcgatggaataatcgagatccaattccaaaactgttatctaaacctatttgattcctgtggaaaaaaaaagcaaaacaggaactaggtaggcagaaagccgtgtatatacgtgtgcacatgtaagtattattttttcagtataatcacttcaaaactatttagaacatactttgatatatttgttgccagtaaaaatgaagcgactgcctctttatctattcgatcctttttaatcaccaaatatacaaccagcaattcagatgatttataagtaactaaatttgaaataataataataataataataaagactatgaaaagaaaaaaaccatctacaacacaacatgtgattaattaaaattttaaaaaaaattatgaaattagaaaaataaaaacaaaagtttaagaaagaatacgatttatgaataacaaaagttcaaaataaaaaaaagaaatattaaaagaacaacccgtaacacaacaatggtaaataacaataaagagggagggataacgggtgagccgtaaataaataaatagggtgtagcggttgatgggacattttaaaacaataaaaatataaatgacgattagattcaattttaaaaatctcaatgacgattaagagaaacaacagcgggcaagccgtcaaggagcacagtcgtgacgtttgactggacttctaaaaagaaaaaaaaacaacgataatcataatatcatatttgactttttaaattccaatgacaattaagaggagacatcgggtggattgtagaacagtacaatgacgacatttgatgtaacttctaaaaatataaatatgtcaatcgacaagacaatgaactaaaaaactataagatctaaatatgaaagtttcaaagaggatgaataaaagttgtgacaggtcgggcgatcaaataaatgagtggtaaaaaagtaaggggtgacgacttattgacttttaaaaactaacccgatgataataagattcaatcttttaagatcggctagatggctatttaacaaatttaaataaaaccatgcttaaaaatatataattctggatgggtgctagccgtgcaacaaataaaggggtgacaaaggagtaagggtagcaacatgtgtgacttttaaaaattataaaattataaacccggggatgataatgttcgatctttgaaagtcctaaaacaacgagatagatatttaataaattttaagtagaatcatgtgaaaaattagataattttgttggtgctagccacgcaattgcgcggaccacccagctagtttgttttaaaaaagctaatttttaattaatcatacgctaatgagttgctccgttttttatgcgcgaggatgagttcccaacaccaaacaactcgaactctacgttagtgaccatcatattgatttgtggaagtgctagaagaacaggggtcatgactaaatacactgctcaaaatactacacaggcacaatagtttgagaatcaaccatcctaaccaggaaaattggagtatttaacaacaagaagtttcagaaaagattagcaaactgttagcagaatataactgatgacctgtcaagggcgttgatccctagggtagctggcccctggctacggagttcgtagccacggtccgtcttctccggcgaggtttgcccctccgccgcaggcttgagagttacgagagaagggaagaattgggacaataaccaaattgcttaatttctggaatgtgccgattacagagatatatggcctaaggcccaactaaccaaagagctaattgctcctaaatgcaagggctaataacaggaaactaattatcctttccatcctagccactgaccgtggcctgatctgccgcagccgcgcgttctgcctctgcgcgcgccgcgcgttccgcagctcggcgaacgtctcgcgctctgcggcgtcgcacatacgtgcgcccccacatgacatctccccctccgtcgagaggcagctcgtcctcgagctgtagagcagggtagcgggcgaagaatggctccctgtcctcccaggtagcagacgccgctgaagtgcccttccactggaccagaacttggcgcaccccacgggccaagcgggctttgatgactcgctcgggctcacaggccaccgcgccgtggtgcacgttcggcagcggcgggggagcgtctggaggcgcgccgtgccacttcttgagcagcccgatgtggaacacgtcgtgaaggcgggcgccggccggcaatgccaagcgagcagccacctcgttgatcatctccgcgatgcggtagggcccgaaataccgcagcttcagcttgccggagactgccagcgacagggacgctggggcgcgctggcggagacgcagaaggacccagtccccaacctgaaacgacactgcacgatgggacttgtcgtagtacttcttctggatggcctgagcttgttccaggcggtagcgaatgtcctccaggaactctgagcgctcctccatgcttttggccacagctgccacgcgggtgtcccccggttcatacgaccggatggagggagggtcgcggccatagaccacccggaacggggtatgccgcagcgaggtctggtaggcggtgttgaagacaaattccgcccacgggagccagcgcagccactgccgggggcgatcaccagtaaggcaccgcaggtacatgatgatgacacggttggatgcctccgactggccgtcggactgagggtggaaggccgtcgtcatgtggagcttcgtacccaccagacgcatcagctcgctccagaacgcggacgtgaagaccgggtcgcgatccgacaccatggattgtggaacgccatggagacggacgatctcggcgaagaagacttgagcgacggattccgccgagtatgggtgcgccaaagggatgaagtggcagtacttgctgaatctgtccaccacagtcagtatgacggacttgccgcgaacacggggcagcgcttcgacaaagtccagtgcgacgtcagtccacactccttgtggcaccggcagtggaaggagaagaccggcaggctggaggtgctcggccttgtagcgctgacagacctcgcaggtccgcacaaaatcctgcacaacgctcttcatgttaggaaagtggaaatcccggcggagtcggtggagagtgcgctggacgccttcatgtccctcctcatggacagcgcgcaggacctcctggagcaggggcgacgctgggggcaggtacaggcggccagcgaacaggaccatgccgtcggccatggaccacggccctgcgcgtgtgccggagcggatctccgcctgtagcgccaccagcgccgggtcgacgtcctgtgcttggcgaagccgctcgatgaagtcgaaccgtggcgcagacagcaccaagacagaagcgtcctcggtggtgtcgcgacgagacagcgcgtccgccacagtatttgctgcgcccggcttgtactccaccgtgaagtcgaagcccagcagtttgcccacccaatggtgctggggaatggtggacagccgctgatccagaagatatttcaggctgtagtggtcggtcttgacggtgaagtgccggccccaaagatacggcctccaatgccggacggccagcaccaagccgatgagctcgcgctcgtacgcagcgagggcgcggtgacgtggcgccacaggacggctgaagaaggcgagcggatggccgtcttgaatgaggaccgcgccaaagccgtgggaggaggcgtcgcactccacggtgaaggccttggtgaagtccggcatggcgaggatcggcgccgaggagaccgcggctttgagggcgtcgaacgccgccgtggctgcctcggtccaggcgaatccttccttcttgagcagggcggtgaggggcgcagcgatggtgccgtagttgtggacgaatttgcggtagtaccccgccaagccgaggaagccgcgcaccgcacgcgccgagcgtggctgaggccactcccgaatggcctggaccttcgccgggtccatggcaacaccagcagccgagataacgtggccaaggtatgccacggagtcgacgccaaaggcacacttgctgcgcttgatgaagagtttgtgctccctgagcaccgtcagcacagcccggaggtgacggagatgatcagcccatgtgtcactgtagatcaaaatatcatcaaaaaacacaaggacaaagcggcgcaagaaggagcggagcacatcgttcatgagggcttggaatgtcgccggggcgttgcaaagcccgaacggcatgaccaagaactcatacagcccgtcgtgggtgcggaacgccgtcttgtggatatcttcgggccgcatgcgcacttggtgatagccggaccgcaggtcgagcttggagaagaagcgcgcgccatggagctcgtccagaagctcgtcgacgacggggatcggaaaagcgtccttgacggtaagcgcatttagcgctctgtagtcgacgcagaagcgccacgaaccgtccgccttcttgacgaggaggaccggcgacgagaacgccgagtcgctgcggcggacgatgccttgggagatcatggcggcgcattgccgctcgagctcatctttatgagccgccgggtaacggtagggccggacagccaccggcgacgtgccctgcttgaggacgatggcgtggtcacggccgcgctgtggaggcaggcctgtgggctcggtgaagacgtcggcgaaggagtcgaggagcccccccaatagggagtcgtctgcgctggccgcgcggactgccggcccgtcctggtttggcgcgccctgccagcagatggtacggccctccaggtcgaacgtcagggcgcgtgtggtgacatcccaggacatccggcccagcttggccatccactgggtgccgaggacgatgtcatatccggcgagaggcatgacgtacaagtcgacgtggaacggcatgccctcgatggtgatgggcgcgtggcggaggacgcctgggcaggccaccttttcgccgttggcgaccgtggccgtcatccgtggccgcggctggacggacagcccggtgcgagcggccgccgactcgccgatgaagttgtgggtcgaccctgtatcaaccaaggcgacgagcgtggtcgcgcccagctgaacccggagcaggatcgggtgtcccacggcgacgccggccacggcatggagagaaaacaccggtgcctccgcgtcgacctcgtcctccggcgcttcctcgtcctcgtcctccacgctgtccacaaagaacagacgtttgcaaaccttgttgtggccgcgactgtacttttcgtcgcagttgaagcacaagccgaggcggcgacgttcctcctgttcggcctggttcaggcgcctgaccggccggttatcagcagcggtggcggcgggcggcgcgggcttggcagccccagctggagccggcaaggcgagttgcggccgaggcgcaggtgccggcaggacaccccgaccaggagctttggcgggaacggcggtgtactgctcgatcagctcgaactggcgggcgaggctcatggcagccgccagcgactggggattctgcatctggacttggaggctgagcggaggaagaaggcctccggtgaacagctgcactcgctgttcttcgtcgaggcgaccggcgcgggggagcagggcctggaaccggtcctggtagtcctccactgtgcccgtgcggcgacaggaggacagctcgaacaggggagcggaccgcagaggtggcccgtagcggagattgaggagctccttgaagcgagtccacgtcggcgtgccgcgctcgtcttcttggacctgcatgtaccaaagttgggcgccctcgaggaggttgtgggaggccatccaaaccttctcctcttgcatgattcgctgttgcaggaagaaggattcgcagcggttgatgaagattagcgggtcgctcttgccgtcgtagtgcgggaagtcgggtcgccagtgcttgggcggccggtctggcggctgatcgccaaagccggggcgggcgccggacgtagatgaactggtggtggtggcgagcgcagcgatcgccttggcgttggccgcgatggaggcggcgttggccttgatcgactcgtgcatcagcgccatgtccttggagagggcctcgatggaggccttgaggtcgtcacccatgtggtgggccgagcaggacgcgactgagggtgaggacgcaggggaggcggcggcagcaggtgggaaattgggcggagcgacagcaggggcggcggctggagtggtggtggagtcgtagatgggatcggtggtggctggggcagaggtggagtcggcaacggaagacgaagatcgacgtgaccgcgataccaggttgtcaagggcgttgatccctagggtagctggcccctggctacggagttcgtagccacggtccgtcttctccggcgaggtttgcccctccgccgcaggcttgagagttacgagagaagggaagaattgggacaataaccaaattgcttaatttctggaatgtgccgattacagagatatatggcctaaggcccaactaaccaaagagctaattgctcctaaatgcaagggctaataacaggaaactaattatcctttccatcctagccactgaccgtggcctgatctgccgcagccgcgcgttccgcagctcggcgaacgtctcgcgctctgcggcgtcgcacatacgtgcgcccccacatgacatgaccaccagcataacattactgctaatatattatgcacatatgcttccttcaaaaatattatgcacaacacaaaagtagttgcagacttgcagtaaatgcaaagttcactagctcaattgaagcatatttctccccgggaaaacaaccaaactgcaagggccatctaacaaacacagggaggatacaccatcatcgaattcaaatgtacatatctcgtggcagaataagcccacttaagagcctcattggtcagcctaataagccaaagcaaaagctaaaatttaaaatttcgaacttaattttagagttaattttaagatatttttaatgtaactttgattttaagttgctacgaacaaatacataaaaactttacctataaattaatttgtattccctagtaaactgttttggtttattagaaaatatgggtaaccgatgaggctctaagtttcgaaatttcacccgaaatttccgttgacccttaacaattacaagaagacagacatgtaatactgccacacagatcttcgtaagatcgtaagagacataactttgcagcggaaataatacggggggatttgaatccttgcggcggatcagcacatggattccgccccaaacttcatcgtgtccgcccagaacttggcctcctgcgcgcgggtaaaaccccactaatcacctggatccagcgtgttagggtttcgagggcacggaacaaatcgcgccaagagagagaagaagaacaagcggcgggtagatctccttcttcacgacgctgccgctcgccattgtcacctgctgctgcgaagctctctttctctctctcctctcttcagcctcacttcctctttcttctttcttttgggcttgactcgttttcctcttcctgggccggctcggcccggtctgactgctaccatgggcttggccagcgagtggccaagacatattcgtattcggtcacaaaatcttatatactcagcaccctctctcaaatcaatcacagccgagccgccggattattgcggccaaaaatcatacgtgcaattcagctccagtctcaagaattccaaagatatatcatcaagtcgatcaccagccatggtccctctagaaaacctacgcgacatgtgcggcgacatcatcgagaaggcgaccctggcgcgagatctcatggtacccatcgcaagccaactgatctccgaggacagggacaggtacaacgacctccatcgacattgtgtcctagcccaggatttcacgaacttcctccagaagctcaacaaggtgagcgcgctcgaccaggtgtgcacggacatggtgacgttcggtgccattgaagctatagccttgtgcgagaggccgagcaacgccttgattgtctttagggatgaagacagtgtagctatcacggtccataggcaggaagaggtcgaaaatgggctctatttcgcggtcccgcctctccaccttgccctcccatcctgtttcatcgaatccaaaattatcaaggtacgtattagtttgatcgatgtatgtatgcatgtatgtatgtttcaatctaatctctccaaaagttttaaaaaataaactagtaaagaattcagactctaataacttttaaaaatatatgttctaaaatataagagattatctgttgtcctatgtcaaactatcctaagtttagtttaattaagttttgtaaagtagagtaataacatcaaacaaataaattataagaaatatatttcataatgatgcttatttggtatcataacacgtaaacattcttatttcttcttttttttctataacgaggtaagaaaatctaaggacgcatggcactaatggcactgtgcaattttatctctattttatgtagagaaaaagaagttagctagcagggacaagtaattcgatctctagtactaacaatgattttttatctaaaccatgcataaattgtttatgaacaaaaaattgttatgctaactatcactagaatcaattaggtcgctctgtatccatcagatccgtcaagtgaaggaaccacgaggccagcatatgatgcagaagctagcgcagcaagggcaatggtggagctaacattggagtctgcagaatatcaataccgttgtggatgcggccgaggcatgtgattgtgcccaaccagaacctgaattacccgagtcctacgacaacggcgacgaccactcatcatggtcatggagacaaaaggtcaccatggaacaccatttttcacaccagttttacgctgtctaccgtgtcagaactctacggaccaaggctaggagcggacggtcacctgtggatggatggagccagtttcactagctacttaaagggcgcagaaatcaacaaagtatccgtacgagttgttcaactggctccaccaaattactggatagcgctctcggagccgatgaaatggcaactggctagggattgttaacttgtttgaccatcaaagttcaaagagatttttgattctttgttaataagtggaaaggtggaatctaatttcaaagaataagctaactcttgtagaaatcttactgtatcaacaacatgttatctctttccataacatataattaatcatttactgtaaattaagggcatgttcaaattgtaaccaaaataaaccttaccaaattttggcattgtcaaaattttgacaattttacaatattgccaaattttggcatgatttcttatttatttactagagtttggtaagaaactaaatggatgcatatatttagcaactttaccaaaaaaatggtatggcttgaaatggcattaatctgaacaagccctaagataataatgttccctttgacatcactacctaggctgtgtttgattctactggttgggaactcattccttctgcacagaaaacggagcagttcattagcgtgtgattaattaagtatattagttttttttcaaaaatggatcaatatgattttttaagcaactttcgtatataaactttttgcaaaaaaaaacatatcatttagcagtttgaaagtatgcgcgcggaaaaagagagaagtgagttaggaaccatgggtatcgaactctgcctagtgttacatctacatcactactccttccgtaccgaaaaaaacgaatctaaaactagatgtgacatattctagtacaatgaatttggacagaattatgtccagattcgtaatactaggatgtgtcatagccagtactaggttggggcctcatcggatagaggtatgggctgaggcttttcagccaaagcccattgaattgcttattgggctgaggactttaagccgaattgcttattgggctgaagactttaggcctcattaagccaaataagctaatcaatggcttttctttagcttaagaagaaaaggcaactttggcttatcagtcaaagctctagaataaccgatgagggccttggttttttatgggacgaaggaagtacatggatatatactatatcaaagattagccatataatatccaatatatataatataatctttcatgttttccttactactaactgccaaatactgcaacagttagacacatcatacatgactactcgtgtactcagggataaatggctaacataatttatggtttcttactaatatatttttctaacctaaatgaaggaagaaaaacaaatagaacagtggtgagcagggtattgcaactagggacatataacgtggaaaccatcgaataattgaaaacccgtaaaaaccgaatctacaaatttgtgtaaattcatggaaaaaattgctactacctctattctaaaataattcaaactagataaaatgtgacatatttatttatccggatatattgttgtagaatagataatattactagggccctgtttaaattccaacttttttcttcaaacttttaacttttttcatcacatcgaactttcctacacacacaaacttctaacttttccatcacatcgtttcaatttcttcaaactttcaattttggcatggaattaaacacaacctagaaatagatatatgcatggatagattactagaaatagaaatacatatataccttccttgttggtatgaatgtatttcatgcatatatttatttctaataatctttttacgaactagaaaggtagccctcacacgtgcgtgggttaccttatttaatgtgcgtaaaattttattacgaatatctatgggtggatgactttgtattaaaatattcttttactatatctaaactaaaactaaacatattttaatgtgctctgaacgttggttacaattttcttctagttataaccttacaatacatatataaattctaaactaaaattacttgaaaccgtgcagtgttcaaaataaataaaatgccctaactaaagctccgttcccatgctgcaggcctgtttgacacagctccagctccagctccacccttcgtggagctgaagctcagccaaaaagtgtcagcttcattcaaaatggaagcggagctgggtggagttttctcacaaaataaactggagttgtggagctgggtttaggcagttccataactctactacagacccaacttctgaagctaaatttagaagttggagttgtaacaaacaggatatcaacgcgctaaggaactgtcattaggacgtgccgtcgagctgtctctttgagatggcaccggagcaaggagacactgaggaagcctttgtgagttgctaatattataaacagaaaatggcatacctcctgaactttctagaaacatagctggtaaatgttagtaaaagaaacatcgctgtaataaaatagaatccagaaactccccagatctcactactgaatagtataaaaatcaaactcaaaattccaaaaaaattctcaaaaagtggaggcgaccagttcatcctccgctcgctgcacacccgacccgctcaagtgcggagacccccccccccccccccccgcgtcgccgacggccgacggcgatggacggcgacgaccggcggaccccgctgctgggcggcgagggcggcagcacccgcccgccgtcgctgcggcgccgcgactcggcgcgctcgctgcggagcaccttcctgtcgcggctgcccgacaaggtgcgcggcggcggcgaccccgagcgccccgccgccgacgtcgacctcacccgcgccaaaggcctctcccaaggtagtacctgatttcctcgctaagctcgcgcttaatccatggaggaaagtcgcaaagctttgttctacacttctacttagtgaatagtagaagtgattgcttcttcccttgtgagtaggtgaaaaggagtactatgagaagcagttggctacactgaaaatcttcgaggaggtggaggcgctgtgcatgcccggcgaattcgagtcggatgccgaggtgctcgagctcgaggacaaggagcagaagcagagcgagtccgccatgaagatatcaaactacgccaatatcatcctcttggttttcaaggtgaattgattttgatttctcgcatcagggtagcggagtcaagagtcagagtgacaattgatcgttgggacacggatgcgaaaggttgagaagcacagtttgaatgatccgtttggttggcatatgcaggtttatgccacgatcaagacgggctccatggcgattgctgcatccacgcttgattccttgctggatttcttggctgggggtatcctttatttcacacatcttacaatgaagagtgtgaacatttacaagtatccgatcgggaaattgcgtgttcagcctgttgggatcatcgtcttcgcggccatcatggccactctaggtgtgagatccacctccattaggagactgatattagtcaactgcaatttgcacgctagaagtttagagttatgaatatctttgcattctttttaggtttccaagtcttgatccaagctattgaacaactggtggagaacaaggcgggagagaagatgacaccggagcagttgatatggttgtactcgatcatgctttcagcaactgtggtgaaacttgccctctacatatactgcagaagctcagggaatagcattgtccaggcatatgcaaaggtatacctgccttgactatataataatcaattttgaagcaattgcagaagagcgtcacttgatttattcgaacgcaagagtgaaactatgaattgccttattgaaccggtgaaaactttgctgctctaaaattcagttgcctttgtgccgctcaggaccattacttcgatgtcgtaaccaatgttgttggtttagtggctgctgtgcttggagataagttcttctggtggattgacccagtaggggctgtgctacttgctgtgtataccattgtgaattggtctggaactgtatacgaaaatgcaggtttgccctctagatttcttaatacttcgctcccctttttttaaaccagctcttttcgtttttttttaaccaagtgagattttttcattagcaaaagagtgaaactgaaacgactcataaaagaatgtgaaccacttaacaaggaaaatgatgtttagagtttaatggcagattgctcggcctcaattgcaccagttgtcaatagttttggcaccacaaatcttgacagtttgtggttgtaaatctttatgcagttacactggtgggtcagtgtgccccttcagatatgctgcagaaactgacatacctcgccatgaagcacgatccacgtgtgaggcgggttgacacggttcgagcttacagctttggagctctctactttgtcgaggtcagccattgcagctattcagaattacagattctgcaccaataagtttgttttttttttaatttttcgtgccactccatatcttcctcatgctagccaatacaacttaggatatttctgataatctgaatacacaggttgacatcgagctatctgaggatatgcgcttgggtgaggcgcactccattggtgaatcgctgcaggacaagatcgagaagcttccagaagttgagcgtgcttttgttcatgtggattttgagagcactcataagccggagcacagggttcggagcagattgccctctactgagccttgagcccttgacagctccagttttactcttgtgcagtgtactgaaattctggtactgtagtacagtcttccactggtttggtttgtcgctgaggcagcagaaggcttatggttacacgtacacggtgacggtaggtcggtagctggcttttgggtagaggaatctgtatgtctgagtgaaataatactggattcgccatttggtgcgtttccttttttgtttccttttggctggcctgctttcttgcttcgtaacttgaccaaaaagttctggccgtcgcaaagagctggaactgtgaatacattttctactgcataaaacgttacacgcatcatgcatcacctacacggttacacccgatagaattcggttacagttcaattacaaggcactcccgagtcccagaagctagcacgtcgagcagacaaaccctacagataaaatttctcctcgccatgcttttaagctttacgctaaccacatgcttataataataacgagcattgccgcgtcatttccagattgaagtggcagtgaagggcaacaaaatgatcatcaccttgctgaaattagtgggcagcagcaaccatagccgtgcgagcacccgtgaaagttgatatcagcgcccccagctgtaacttgtcattgcaagcaaagcttagccggtacctgcacacagacgccatgaacaacgtgccatcttaagggaaaaggccataaatggttatactacctacctttccaagaagactaaaggctaaaaatatttggaatatttcataatattaatcagttattatacttccataagtattccagatagccaaaggtcaactttaggtaattgcatcatgaaagcaacccaaagactcattttccccccaaatgcaaacattccacaaggcacaaataagcaattccaacatgtgaggtttgcttaacaactattgctttgcagtatgcaaccatttaactgtaatggctaaattgtgaaacacatacaataaagtatgttagctggtttaaattatttattattatttttcttacgtaagatactccatactagttatttgatgtgatgacataaatgactatcttgaagcatataatatgaataaatcagcaaaatgttccgtcaaagttttgaaaaaaaagggtactgagtagaaaatcagccaaaaatcacaaatgatttatgatcaaataaaatattatatgcaagttctaggtgaactaagcaaggcacactaaatttgacaagtaatcaactttacagctgaaaacaggacgtactcgatatcagccagatcattaatcagctttatgcgtacatcagatggcatctgtattttgaacacaaacctgcaagaaatttcttttgcgtattaggagaaggttttagaggatttgaggaataagaaggtttagagaaatatagggcatgaaagagggcatacatagtgacctcccgtatgatatcaaccaaggccagtccttttctcatcttcatatcagatatacctgaagcagataggacagtgttttcacaagactgacagcaaagaacaaattgcacaattcatgtttaaaccatgaattgtaattgttaggagtatgactttgataattaagaatacatttgaagctggttgaaaatgattcattcagcaaccagtatgctatctgttcaatgtctttcggcatggggtttcctgtgcaaaggtacacagcttcctctgttatttgcttagatgccatgtgtgttgactgcacataaaaggtaaagcaaatcagtgtaaaacatatatatatatatatatatatatcagttcattgtacaaaaacaattagtataacaaaacaggttttaatggtttggttgaataatttacaggcatctcacaagtaaatgatgtgatatcattgccaatatggcatggattagctaaatctagcatcacatgttcttgttatgaagtgagggataagtatggttcatccagatctatcttaacaggcaaaattttcttgtctattccaacacaacccccatgcacatgggcctttatgtttttcataaactaaatataatgattaatggttaaaaaaaagtaggtaaagaatgctcagcaaacgcttattcacacataacctgcaatatgttcaaagccttcctcatatcaccattacttaaccgcacaagggctgtcaaaccaccgtcatctacatcaagcctgcaagaacacaaagatgtggcaacaaaaatttagactaccacatgaagatagtgacacaatgatattatttcaaaacaaaaccaactgaattctcaagtctcaacagtcaacatgagcaagaaactttacaagagaaacatatcgaaggttctagtataatctgcaaaggagcattaagtgcttacccctcggattgtattatatgtttaagacgttccctaacatgagtgccatcaaggggtgcaaatctaaacctggtgcaccttgattgcagtgctggaatgattttgttcacatggttgcatatcagcgcaaaccttgtgctccttgtatgcttctcaatgactgtaagatgggggagattagaagatgtagctgaaagaaaaacacagcaatattgtggtgacacaatgagaaactctgaacaacagaccaacctcttcgcaatgcaaactgtgcatccttggtcatggcatctgcttcatccaatagaaccatcttaacagattgctttgctctacgcaagataaatatcagatatatgacaaaattgaattaaattgtataccagatctttagtaatgcaaattatgcaataccagtagctccaataaagcataagaaaacaagcataaaaaagatccatgagacaatatgcaacctccatgggattattggctcacaagatgactgcataatgcatgctaattacaacaaagtatgaccactcatacacaaacaacaggaatactctctcaacatgcatttccaaacccacgatagatcgtgtataggtaggtctaggaccaacaaagatcaaatctggtatatgctaaaacacgttcccccttattagaaagaaaatactactcaaatatcttcccaaaataataacatcaaaaaatgtaaagcatacccgaaagagagactgcgggcacttgcgaagtcttggatttgctgccttacaacatcaataccacgctcatctgatgcattgagttcaagaatcatgttgccatactgtgacccatacaacttccttgcaacggccagtattgtcgatgttttcccagtgcccggaggcccataaagcaacaaatgtggaagcctgttctcatttgtaagcctatcaactacaatataatgaaatgacacaaaatcatcagattagcttaatggtctaaatcagaaattaataaataggttgaaacagaaaaaaaaatcgctatttacttctaataatgtgtcaaaactcaacaacccaaaatatgtgacagcttacaataagctaaatttgggagagagagagagagagagagagagaaatatcagcaggtcattatatcacatactaaaacagttcctcactacctaaatggctaaatataatacagtcacacaaaacaagcagaaaacccaattgcatgactcaaatgaccccaggctcctaacaggatgcaacatagaggaacaactaagacaaatatggtgaaaactaaccatcacaattcatggcaccaagttaacaacagatcacaagctggagctcactagcacgaattgccaaatcccctgaaagaccaaatcaaccgccaaatcctaaatgtggagctggaggggagacatgagtgtagaaccacaaaatccccatcatgacactagcaaatagatagtgattattcacaaaaacaaaatagcgatactacctacagaaatcccgtgggctcgcaccacctcgccaataaaggcaaaacaacccccaaatcagtaacccaatcgagtcgctccgctcctaaaaccctaaaacgccgagcggcagccaccgactacgcagtagctcaatcatcggcgcaggcgaaaccaaaggggggagcggcggaagcttactggtgtcgacgatgtcgcggtgggcggcgacatcgccgagggattgggggcggtacttctcgacccagggcgcggccctaccgccgggagtggaggagagaggcgccttgcccttggcggccgcccccggcggcggcgcggcggcgtcgatgtccatcggagtggcggcggtggctcccgccatggcgtagcgcagagagaggcggaaaccctagagctggaggagggaatcggggggaatggttggcgccaattcgaaacccctctcgcggcctcgccttggcgaggggaagaaatggaagatggtcaacgtggtcagcgatgcggaggagggttgttatctgggccgattatgggcccagcccatttagccgctgcaactgggccttcgagagtagaattaggggaagaggttaattaaatttccaatcaccatatgtgaattcgaattgtcttattcaaaaacatgtgagttcaaatttgaagtgagtatagtcagtttagttcaaccgtttttaaattagcgaaaattggctattataactcatgattagtgcagtgcacaagctgaacagccacgctagaagccttatctgaacccatggtaaaagacgtgaacagccacgataggggaagctgaaagtgcagatgtgtgaagaataatctgtattcttttttatcttttctgcttttcggcaacatgtatatatacgggagtagacggccgctgccccgcaccgtcattagcgcagaaagcagctttagccgtccatcaacagccgaaagaagagagagacggtgccaggttctgaacggaaagtcaagaacgagattccatcttttctgtcctttattaatcttttccatgctatttcccatgtttgattaattaacatactgataacaaacggcacatttctgtcggtattgaggtgtttgtttatcaaatattctggtttggtatcggatcttcagtccttttctaaagaagtgtaccgcactacttggccactgttgccaacatgatttacatgccaggcttgtgctcactgataattaattaaggagaaaatgctctaaaaacgtttagcaaactgatctgggtacagtcaacgcagttagttaccaaactggtcgaaagttgcgatttgttcgtctgagaaaaaaataatatcgacttgattttgaactgttctttatttatagcacacaatagtgtgtcagtgtcacagtatgctgctgccattacatttacatccaagattaattgatactgtagttattaatgcctaatagctcaagacaccagagtccagacagtccgggctccaatgatcatgcagcaaaaatatcccctacctatcattttccatttttcctcttctccagcggtgaagccagtgatgagtagaagtaacagagtaactatactaaaatggagcatacatggctcggctaggtttcatccgtggaatgaaccgattcaaagttttgaacctgcacctgctaatcgatcgatcgattgatgatctttgcaaatttcattgctctcgtcggtgatctcggctcaccggcggcggttgacgagcgggaaccaccaatcttggaagcaagactggtaggagatgagcagcagcacgagcgccagcgccagcgcgacgccccacggcgaggagccgtcgcggcgctggtcgtaccagccgccgccgccgccgctgtgctcccctaccagcggcgccatgagcagcgacgagagccccgaccgccgcccgccgccgcccgcggccgccgcccagtactgcatcgcgagcaggagcagcagcggggacaggacgacgacgacccggacctggtcgaacaggctctccaccgcggactcgcaccgcgagtagagcgaggcggcgccgagcagcgacgcggtggcgaggaagatgaagaggtggaacgacgtccccgccccgtccgccgcctgccgcgcgtcgtagcggtaggacgacggcgcgccacggtcgtcgtagtagccaaggctcgccatgtctacaaggctacacctcctgctgcgctgctgttcttgccggcgatggacgaaagtccgaagctgcaagggagaagacgagatggctgctggtttatattggcgggagagaaaggaataacaacacttgcgagagagagagagagttgagctgcgctttacttggcgggagggggattccgcgattccttcacgagggaggtgaggtgaaacgcgagagcggacgaaccgcgcggcgacgcgtgtgccgccgccgaggcgtcgaccagtcagcttgggcttggaaagcgtcgcgcctctattgtcctactactacgagagcaggtacaatatcagcttataagcaagctccaaacatattttaaaaagataaaaaaaaagcaaagtagcgaactatagatctgtagctagctgcgcatgaactctaagatgtaatgtgtgtatggcaggtgggaccagattctaattttatagtaagcgactattatatgaattcaatattttattggttataaataatttggagctagtagtggactatagtcactatactattaaacttactctgaaaggatgtgcctttttgttttggaggcacttggcgagttggcgaaaaggatcttttgcgatgaggcgatgaccatgccacaatggcatagacggtgagggcaatggctggcaagttggaaagcttttggagaacggtgcgggtgactgggttgagtatggtgatgaggcctttgttgcctacgggttacactgtcacttgcacacttaactgtgaaaaagaacccaatggtccagtcatataatcaacgttaaagtacacaataacacatatataaaagttttacctaaaaatttatttttatttttggtttattagggaaaaagccaacgatgagagcctgaaagagaagtagtctcctatctacacccaagcaacaaagtgaagctttgctcaaggattagtacagcgctgcctatgaactacagtacataggacaacaccaggtgggcctttttttgttgaaaggccatcaggcagcagtttggttcctgcatggctgcaccggttgatttacgctggctttgtcagtggtcacccgagcgaggtaactgtgttggatgcgtagtactatggcctgtatggttcatgggcccggtattgtcggtgttactgcgtcccacccgactatcattttgctttcccagtatcaccatcactgttcttttttatatgatgttggttagtccatatatttaggatggagttagtaacatgccagaagaggtgcgcacttcaaggcaagaaaagggtatgcatgaaggtatcaccacatgccagcaataaaagatcatcatcctcatgttgcatcgcgaattctgtttattgaaccaaatgaaggcagggctggtatcaagtatgagcattgtatggaagtaaatggagcaggtatgatatgacaaagcaaacgtttgcatttccaaaaccaacgccggaccacaagaggcctgactattacattattactgaagcaagcatcccacaggaaaaacttacaaaaggttaactgatgatacaatcaatgtgattcactcacgcggaatatattcacaaaccgatgttctccccaagtgcaggatgggcagagccaatacatgttagtagatatatttggtaggggcaccagtgacaggagaatccaaaaacccattgcagcaattatggaagctctcagcacatcagcccaacaaggcctcacaactttgatcaaccggcgaatatacaagatgggaactaattcacactgcaacaggaaacctggtataaatctcttatcttacatacagacgtacccaagccagtcgcactactaataattaattagcctagagttatgatgttacgagccaatatatttggtgtcaaaatcctcaagatcatggccttgagactttttcagttttgccactagaacccacatgtttgcaagttcactttccaagaaggcttccttttgcttcgactcctcaattctcctttggagttctgcttccttttgttccttctccataagcacagcttctaatgccttttctctctcgtagcctgcgttgttgtctcttcttggagctggctcatgtcgtctactgatgctatccctccgagtacctctcagtccactgttggctctacgcggggttggacttctcaccgatgccaactcagaagcaagcttctcgttttggttcatgagcttggtgacttcttccgacaacgctttcaattcaactcccgcagccgaagccaagcctttcgcgtacgtgctttcctctagtagcttctggttgcgagtctctagttgagcttttacttcaatcagctcacacaccttctgcttcagctcatcaatctcaactgactgaaggacaccccccaaaagaagtaagttaaatgtgcaaaccaaccaagtcatagagaggcagcaccataatgaagagcaagattgcttagaacctcaaatggtacaagcagagatcattttgagtcatatggtgtaaaaataagaagctgcaataaatgtttttgaaatctacagtatgcaaagattatgagatagtgcttgcgtggaagtgcatgatcaatgatttgggataactgcctattggaacagatcagtttaaactgaaaatctgatcctcgctccataacacagggtcaactggccaagataaactttttgatcatactaaaacaatgttttcttcgatgtctgtgttgctgtggggaaatagaagtgtgcatagttgtgagggatacagtgacaatttggtgttaataagctattatatggcaagcagacatagattaactgaggaacttaaattttgaaggaggttctaagtggtctaggttctgatctgttggcccagttatgaaatgaaaggaaggcaaaagaaagaagatagaattaaacctgtggttcttttggcgacgtttcaccagggacctctctaggaactgatagttcttgatcagcatgattatcagtttcatggttaattcctgcattcttctgcatcataatgctatttgacagtgaatccttagcttgaagagtttggtaaagttgctctttcaggtgagcaacctcctcttgtaattccatgcattcagttgtctggcaacaaaagaaattcagagaagcaatacgaactgatttcagttatccaccattcaactttcagcaaaaaaaacaaattgattttctagcacatctaaccttttcattaagttggtcttgtattactctgttatctgctgccttcacctgcaataaaaaaaggggaaaatgaagcttcacagactaaacttgttgtgcgcattcacatgatagaaacaaatgcgctgttctgttcataacaaaccacacaaagctgtatctaattatgcacatgtatagcgaagggacaagaccaatcctgatctgaatttaaaccatcctaagtttgtgaggggagtaacaatttgtttgttcaccatatgttccatgacaatagagtaatattgcacaacaaagggaatactatggatgaaaaaactattacatacaattcgaatattatacagtcaataaaactaattgaaagttgtatattatctagcatagcacaataatctgctaccaaaaattggtgtgctagattcagttgcaataactttggaaggaatcaaggaactagttttaaaaattgggtattggctgataaaaggtttgcggcgatgactcctgttgcatgcaacgtagtggtgataattgagcttgaaacttgataatactggctgtgcatcataaatacctcataggaagtttacagttgataaaattcatatatataagtttctcttctctttttggttcatgactttttaataaacccttgtacaatacacatgaaagactgcaaagtgcacaaactttttcagtacctcgagatcaaaggatttctcgttgagttgctcaagcagttcagcataagactgaaaaaccaataataaaaccatcaaattgtttaatagaatacttggaacaaaacaacatgaactgaagcgaatgcaggatgttaccggagtaagttctaacttgtcagccatcccttgattatttgagatggaatgaggtatctgcctttctaaagacgctatctgatgcttctttcccttaatttcatcattaaccttcttcatttccatcttcatatgtaaagaagatagagtttcaaggtgaaaagcttttagcaacatacgaaactgaatatcaggtaaggtatagagtacctgaatcttctcattatttgggctccttccagcttcctcggtaaggcgctttaggacacttgtatgaagtgcaacctcccctgacaaaatcttcaattgctctctcagtaagtcaacgtgatctattgtttttctgctggcctgtcaacatatcacgtatcaaaatatgccaaaaagaagtccatagtaagacatcatgctgtttatattacatcactaggatttgcaactatattaatcttctacctgtgtctataaagaagtccacactagtaaatatttgagcggtttagttgtcttggtaatgctaaaaatgtatcatgtaccccacaccatgtgccatccatgtatagcacttcaaaatttaaattatgctcttagttaatacacgttagccaacaaaatatactacaacaaacaaacttcagctgttggctatgagttcaaaaataacacattataaaccagtaagccaatcatgactcattagtcgatcaaagattgtttaaaagtggattgctggtttaaaactttaactaagtcatccttttctgctttagatgtatttgtttagctgatatttcacatccgacaaatttcggcctttaattaccaacaatgcatgttacctaccagaggtgtttcttctccatgaaggctgtcagtagcgaactccccatggccaatgctaaagagatcaaccgatgcactctcaccaaccaaagaatttgatattcttggttcggaaggaaaattaacactctccccaataggtgttgaaggagcagttgatttagtcaaactggacttgtcaccttctgaacttgtcagaatagaagctccaccttcacgtttctggacaatagaaccatgggaaaatgttcgtgtgaatcaattattatttcaattttaaaatcaggattggtgcacatgagttcatctatattgtaacaattcatgacgattgcacttgcatctatgtaaaagataaatcaaaagaattgaataaatggactattaagaattgcccaatttaactatacccgaagtttaaaccaattaagaattcctttccgattctttttctcctccttcgaatcttcaagtgtcatgccaagtccttcaacaggagaaagtaattcattgctttcattatccaacacgatatcacgtcttttgtaaggtaggtacgcaagctgcaatttgaacaagcaaactttatcatacaggaagttacccatactaactataatgaggaaaaaaataaagtagtaactcaaattttctgcaaacacactaaaacagagtctgccgatttattgccaaaagtatctcagtaacaaaagcaaactacattatcgaaaaaacaaaagcaaactaaggtcaaagtgtaacatgtgtttgacatcataaccatacctcctcttccccaaaagaatgtcttcttcttggtccaggatgtggagaaaatctagaagtttgtgtcgccttagtggagaccaagataagctttgtgagacgctgtatccttgcaagcaaagcagctttagcttcctcctcttgttcgagcctagactgcagcttgacgttaccatcttctagcttttcatatgataaacaaactccagttaggatgatacattcatacaccggcaaagtgaacatgcaacattatataacttgtaagtataatattattaatctacagcacagttcaagcagacaggagtagctgaagacaaatctgtaaacaactcagttaatagcatagcagatctcgcatacatacagttaagcataatgtgagcagcaaaggggcaattgctataagacaataaatattccaccttttgtttccaaaggatgatattatcttctccggcatccttcactggagtgccagtaataatacccattttcagctgttctagttcttcctttaatctgcgaatctcattctggtatttctttattaaagatttttcatctataatctgcccaacataaagaaagattcaggagaatatgtcagaaatacttcatatgatatttggcacaaaaataatggttaagaattcctgctaacataacctactttgttttgtgatgcttggacctcaatgcgttttgcacggtgggcaaatttcagtgtattatgagtctcttctgagttgctcgatgctggagtcactgtacagatcagctgcaaagtataatagaatgaagttgtcagacatccaaatcacattgaatattaaaagaaatacattagctttaaccaccatcccaactgataatgaacaacttactgaaacacgtccttgaccactcaaggatgactgaagtagacgtgttagttttgaatcacgaaatggaatatgtgtagcttttccgtcagtaagtttcgatatcacctggaatacaaaagggaaaaaagcttcttaacttccaacctatgatgataacctctataacagatttcatggatcatgacttgcggcattattttatatgtaaattgaattcatttaactggataataaatgcaaacatatcaacagaaagtcaagcagtgcaacagaacacattggaacttggaacatattatgtcgaatgaatagcaaaacagatacaaccacccattatgccaggatgcaaagatcttctgatgtacagccaatgactggacagtaatcatgagacttacagttccaagtgttagcaagcttttattgatataagatccttctttccggcgtactccagtagtttctgcccttgagctctcggaacctgccagatcgatgaggttctgcaaatgagtgagacaactaaataatcaatacatgattttggcagtatggtcaagagataactgaaaacctaaaacccaccagttgtgagaaggtaactgcctcgccttcattagactcaccacaagggctgctctctacagtctgtcagataacaaaacgaaatgaaaagggagaaggaccatatcctgatatctaatgttcttccactagtgagaagtatattttgcatgcaatttataatcttgcaatacagcagtgcaaaggaaatatcaatgtttcgaagttatataaagatatctaaaaggattaccagtgtgaaaattgtatgacttctgctactaagtagattgaagttagtggatccaacatgtctatgctctgcaaaggaaatatgaaggatctccattagtgaaagaaaactttaaaccatgatcatttttattactcacgatcctgataggttgcttctgcaaataactaaatgttaatcatgctaaaaatgaatggcacagctggaatagtgaacaagttgaaagattctaaaagatggtaatcacaagaagaccttctccagcagcaatgagggatagggcatgtgcaggagataatactacttcttctttgataccctcaacaaatgttccctgaaaaagtaaatgtagatgaaggaactatcagtcaactgtataaaaatgatgctttaaattcattcaaaattctataaagtttaagaatgaacttcaaagcatgctactatatggggtatgaagtatcaaaagatacatttcccacacaggggaacaaatgaacaatgcatggcaccattgtctctaatgactaagcacatgcatgacaatgtttacacttaactttacactgtttttttactctacacatttgaagaacaagacatagccatattaagtgaaaatgcacatgttacctgaggatcctctctaattcgtaagttctgtccagctggattgagcagatcattgacaacctagattcaacgaacccttaattagagcagcacaaaacatgaatatgtgaacgatgcaatgatacaaatatgattgcaatgacaaacctcattgtaaatttccaagtatgatacacggagaagaaactcgcgatttggtgtctacaatggtcagacagtgacataagtgtacagtgcataattgcatgttagtttatttgtatatacatgatgggtccatgtttaaaattacctcttgtataatgctaaatgcgtctttgacagccaaaggtatgatccctggggatctttgatctccctggcccaaaagaacatgtgcatcaagatatagatgaacatttgaaatataaaggaaccaacctatattgcacaatataagcctagccacatataaaaacgaaaagtaaacttcaacatgagtaaattgcaaataatatgctgcagatgggaaatggaagctgcctatctctgtgaatggtaaccacaatacatttaaaaaattacatggtgataatatcatattatcagtagcatttaacatgtgacactttgattccctgtcttatttgctggacttgggacttagagagggtcagataaggctgagtttttattagaaaagaggaacacataaccaacaagcagttataataacttgactgcttcgttttttttttcctggatgcacaatatggttatactctgaagccagtaaaatctatgattaaaagattaatagaaacatgaagctgtaagtgttctcacatgcattgtgtgggtcttcccgctgcttgtaacaccatatgcaaatattgtacctgtggcaataaaaaacagaaacatttatacatcaatctttgcttgaaaccaaaaaaaaaaaagaatccaccaccacattctatcaatgaatggtgtgcaacaataaatagcttatgaaccaaaccgcatatatctgtatcgctataatgtttagaagatatctcatagccatagtatcatggcattctgtaaatacaacccaagcctttcttttcttgaaaagttagcttgaaacagtaaacaagctgttatcatggccctatataaggatagtaaagatcaattaccatttactccctccatggcaccgctgacaacatgttgagcagcaacatcatatacctgacgggttgtagtagttggtgcaaaaacccgatctgaacagcatactatattagtctctgatcaagtaaatttgaagggggataaaacaatatactgatagccttagaatagccccttaaataatattctctcttttcatgagatggcatacatactcgcttgactagctcattttatagaagaatatattgtttttcattcataggctagtatatggaaacaaggtatgcagaaactcttttattccaaacaacaattttggtgccttaaccagaaaatgtcaacaactgattcccaaaaatggagagtattgtgcaaagttatatatgttaaagtaaactattgaagtccttcacgcatctgtacatgtgtcgattcacatttttataagaaaaattatgaataagactccgttccattaacatgacatactgccagtgcaaaacctcttataattagcacaactctagcaagtccaacagtgatgagccattgaagtacaaactcaatattcgtttgtacatgaatagaacaagttatattaccatgttaacacttgtttttacaaatagcctgtatggagccacagaatacaaatcagcgtacagattatgtgttagtacaggaacagcaggtctgcaaacataatttactcccaagtgtcccagtacaccagttggcaaaactactatattgaaatgagaaataaatataattgatgaagtgatattgagaatcccaacaagtaaaccgaacacttagcagaattgagcataatcttttaggcctttctttctattgcactgctaagaacagctgtaggtccaagtcgcaatacagatttgagaagcatttccgggacactaatttgagtgatacaatcaaactggcacgagataatttcaggcatccaaggtacccacaaaaaaacaaggaagtatcacgttcacagaactccttctagaatctagatataggctagaggactcacaccaatctcacctaatactccagccttatgagaacagcgatcgtttggacagaactcaactaaattcgcatatgccaaacgaggtgatgatcagaattcagccagcagagcgccaatgtcaatgccaccaaaagcaggcacgtaccgtaagcataagcaacgctgggattctgctcgctcctcacgaccgtgtcgccgtccgcataccatgccacctcctccccttgccgaatctcgcgggggcttcacaagcgaaaaccaaaacccaaatcaaactgcattcccccaaaatccaagcgcgaccaaacgaaacaccaccaccaccataagcaaagcgagacgaacctcagcggccggaaacggacggtgacggtgacattctccttgggcgccgggtcctcgtcaagcccggcgaacagcggcgacgcgggcccgtcgagcgagagctccggcgtgagccgcgacgaggacgtggtggtggtcgtcgtcgacgtcggcgaccccgactgcggtatcggcagttgctgctgctgctgctgctgcggctgcggcgaactcctcaccaccgccaccgccgccgccgccgaagacgccctccgctgccgcgaagccggccgcgtcgccattgcctccacagcccgagatctagcagcacgcggcggcaccaccaccaccacccgccattggatccaatccaagtatccaccaagctaatcgcccccccccccccccccccgccgctttatgcgggatttttcctagggctccccttttccctttccgtctggctcactcccccccttcactcgtgggtggcggctttcggatggctttcgcactcacgcctttttgcttccgtcggaagcgatgcgggaggaagaggaggaggaggaggacgcggacgccgctgcaaaatgtagaagaaaagaaatcctccctctctccccctctctctctctctctctcttctctccaactggctcttttggtgggtttattacgccacgggagggagcaggacggggtgggtgggtggggaagaggaggctgacaggtggggagggcgctgatgggtccacatgtaggtgagtggatgttgactcgtcggagtcactggggtaggggtttccgtggattttgattggttgtgggcgttggggtggtacggaacggaaggagaggcctctctcttctcttccaactgttgcgtagggggaggcgacggtttactccggtttgatgatgatcatctagcgagattgctgtttttcgagtcagtggtctcattaagaaaacgtactagcaagtttatcatggtagagtagtagtagactagtagtttgatgaatcaaataatgtagtactaccaaaaatatggtagtactatcataagccttgttttgcaaaatttcataggaatttaatctggccctgctcggctgtcatgttggcagctgtgacaggcccattacctgtttcaccccaaaattaagacgtgtgatgcgaacgttaattcttcactttaaatgcacaatggcgatggttgtttctgtaagtcgctgttagtagatcgcactgttatggtggtggttgcggttgtgctggacgagtggactcctggaccagtaacatcattctccctcacagccaatcgatactccttttgcgcccatttctagttggtgcaataatctccatatatgggaacctaatacatatgctcctctcttaatgcgtcacttacactgtggcacaccgaaaataacacctcttgtcccgtatccaggcaccacgcgccgatcccatctcctgtacccatcagcgttgtctttgtcgcgcgcgtacgtagctagagtagtagctacggcctacggcctgggcgcgtcgcgcaccagcgcgagcgggcgcgggcagacaggacgaacgtatcacggcgcgcggtcccggttggatggatcccgccgatcgagcgacaacagtgccaggcgcgccgcgcgcccgcgcgtcccgtccccccatcatccgtgtgcccgcgcggccggtcgttttccaacagcgcggcgctagctcggccgcatcccccggcgcccggtcctcgccatcacacgcccgcgtcggggcacgggaccgcgcgccaagcgccaaacgcgcgtgctccgagggcgtttgcaaatgcaaatatgcaacaacgcccgtgagccgccgtgtggccggcgagtgctcggcgctcgccaccaccatggcaccataggcggacgaccttcccgggcgtcacagacggagcacgggcaagagacaaacccgaccttcccaggtggctcgatcgtctcacagacggaacacgggaagcgacaagtcgacaacccggggcgccactgtttgggatacaaattatatgatgctgcagctcgcagctctctgcaggtgcgtgctgctactgtgctcggtcctctggtgccggatttctttcgagagaaaatgccgtggaaatggaatagtttccgtcacttcggtcagctgagttgcacactcgcaccacatgcgttcgcccagtttgttttgactactggacaatggacatggcgatttggcgagaccgtcagtagtggccgacgtatagtagtactagtagacgagacgcacatggctcaacgtgacaaaggcaacgagtgctagctgcttgttgcactggttcagtaagaaaaacgaagtcaaatatgatttgaagtgtattaaactcctccgtgtaagctcgtagtctaatggactatcccatcatggaaatgagtggacatggtgcccttggacgtacgcagtagcttggatggtatagagtactacggtatgattatgtcctgcacttagcatagattcgattcgcaggtggagcaattagggcacccacaatggttatctataagctatctacaagagatccatgtcagcatattttcctacttgaaagatattaaatgaagagagagagcaaagctatctactagcttagagatagtctatagagaaaaacgagacagtgcatgagagagctatagatacctatgtagacatactattgaggtggtttactattaatctagtctattgctgagatgtacatgttttatagagagcaccatactttaccattgcgggtgctcttagcatgctactataagatgattgtcaggattctattgtcatcattagggctcatgctctgctccatttcttttacagctaggagatgctctgcaaccttggactgactagtgttttttcctgaatgtcctaaattgcaggcaattgaaaaagaaatttcttgtcagggatcagaattcagaagtactccatccgattatctgaacttgtttcagggaaaaacaaacttagaagcatgaactagcagaacctgccatcgtcacactatctgtattttagtaggaggaccgctcaggctactcctacttcacaagtcctttgcagcacatctccagaagatgcagtcatccaatgagacatacgcctgaaatagtagcccatgcaccaaacaaaaatctgcgtgattgagacacttaatcgcgtgcaacgacgagaaagaaaccgattaaaaatactgagtagctgggctggtgattcatctgcctttgtttactggcataatgccattccgctccaaggcaggcagggtcctaccagactatcaaccatcgagattaagataatcgattccttgcaccttacagaataataattgtccggtcgcatgcctgctctcccagaataatacaccactaacattacgaatcattagccatggaaaagctctcagacaagacaaaaagacccaatccataccgtataaattataatcatattccagtgatcaattcatccactgcaagcactattcagtcttcacacaaacaaaaggaaacgaaaacgataactccggagacgtcgaagcgaggggtgaattgactgttgttgccttatcaggtgtgtgtatagtgtatactcctgtgagaggaagcgtgacttgtgcgtgccgccgacaggagcccagtgccctccctcgtttgcttgcaaccacggcgggtctgacgagctgatgggcacgcgagacccatcgagaacgtgacggcaacaacaacagcaacaaccaactatttaagccaggctgttgctgtcgagcgcgacttgcgttgcatcgcgggcagcatccatgctctctgtgccacgacaacgcgacggcgaaagctgcactggatctctctctccaacatgcgacagatcgccgcaacggcgtacaacgtgcgaaggcacggcagcgaacggaagtgcgacgaaagcgaaaaggggcctcacgggccaaggggccgaaacgcgcgacaccggtgtggatttggagcaatggcccagtatgcgttggcgactccggagctccaaacttgggccgagttgctaggcctggagagcccaagacgaactggaggaggaggaatgcaacgttgtgggcttggtaggccatgaagtggataccgttctttctgaccgggcaatcaatctataacgtgggcttgttgcgtctaaaaattgtgaaagtctggtgtgtcgatagtagatcgatggttacctctcgataattccctatgatggaacatttatatttctatttataaattcagtctataactgcgaatgcgaattcgtagacttatcttggaaaaatactatcctgacattgcaagtctgttggactttgcaaatatatccatcacaagggagaaagaagagactggtttctctgggcataattagcgagatgaccaaggtggcggtgaaaagggcaacaggcaagcctagtaggaaaaaaaaacggacagacggttaaaaccaaaaaaccagaatcagcatccttgacggttttgttcgctcacaagaccgtccctgtaattgatccagagtgaaatggttgaatggtctagcttttcatactatgatggcaaggtagtggtggtgctaccgtggccatcaacggatccagaaatttgatacatcggtattataatatgttgattgtgcttaaaccgtggtgttatcttctacaaaataagtattttagtagtaggtttgccaaaaatcgtgggcgtcacttgaccataactattacactgcagatccacccctggcattgggggtcaaaggaggtagtgggtaaggttgaagatggaggcttaaaatctgaagtggttagtcagtggagctgttgaaaacaaggaagaaggtgaggcgggggcatgccgttgccgctcggaggagaggcggttgggttagggggaggggagtagggcactagggcaggtcccaccaatggtgacggttgagtagaactatagaggaggatggtatgagtgttgcaatctaggataaggagtggctgacatacctcaaagggaaggagaggagatcgagaataagttttcatattaatgtagcagcacgaatcttttgatgcgatgaaccgtccaaaataattaaatgacaaaaaattatgggtattttcatgtgacaaaagctaaacacccaagtagaataacatataggactacatatttgtgatttactttggtacacgttttgtgtacacgcatgtgtttgtttgggtgggggtgttatatttttgtcgttaggtaggagtacttgtgagtggtgagctgatgatgctatatgcagtgtccctgtgtcagcacgagtggaccacgcagctgtcacgaacataggagtatgagactgagatgcagcaaaaccttttctagcattacatggtgagcaaccagtaaacccagcttttctttctactagtggagatgttaccacgcagcgatgcaccccgaaggagcaatgttgaagctataggttcgttgtttgcccctgcgccgctctgagcactgtgtatggcgcagtgaatcatcaccgctctgccctagctcagaattgtttctcgtgtcagattgattgtacttgtacagttataatctcgtccctttcctggcaacaccaagtacagccaacactgctggtcaatagattctcctattgtcgtcgttcattcataaaaacaacgaagtcctaagacctagctaggctacaacctctgattatatatggctctatcatatgacatgcgtatccaaatgcacctaacttcaataatgatgatcaggcctttatatagtatatttatgcggctaaattcgtctgtcgcttttcgcatcagcaagtaattaacagttcacagagatatatcgatcgcgttgaaacactggtactctctccgtcccaaaaaaaagacaaaccctggtttccgtgtccaacgtttgaccgtccgtcttatttgaaaaaaatataaaaaaaattaaaaagacaagtcacatataaaatattaatcatgttttatcatctaacaacaataaaaatacgaattataaaaaaatttcatataagacggacagtcaaagttggacacggaaacccagggtttgccttttttttttgggacggagggagtatcttgctagaaaaagttcatgcatgttgacgtcgaaagattgagagatcagcgggtagaatctttcagtcaccgtactgtgacagattcatgatctaaaatgatgcatgcacgatgcatgatgcaggtctggggataatattacgaccatatactacttcatactgttagtatatatgagtagtgcatttcaattaacagtatgaagttaaaattccccggagaagccaatcattttctgcttaacgacgtcccaccctatgcaaacatacaattcatatcttgatgggcagtactgcagtgggtacccatgattttcaccttaaaaaccgtgccaatcacagcatgcatgcaaatggagaccagatcattcattagggcggatgcatatgcatgcatctcgtgtcagatcggtaggtcgatcgatccatatgcatcgatcgatctgctgcagccagtaagtatatatagcctgcccccaccgcattgcatcatccagtcggagtacgtaggcagcagcagccgatctgtctccgattggcgccggccggccgcctgcccgcctcggcccggcccatgtctgctgccttggtgtcggaagcagagcttcgctcgcgtcgtcgtcgtcgtcagctagcaactgatcaacagttgcgctagctgcaacgtacgacgagcgcgatgagatgagcaaactcgccgtacgttacagctagcgtctcgtactgctccggccagcgcgcggccggccggctgcccggatcggagtaccaccaactctcgcccactcgcattccgatgcggttaaggctgcacatgctagcgcgcgcgcccggtacgtatagtagtacagtacatgcttacaaacagcggcaagaacgaagagcaaagaaatctgagaaagatcaatgcgtcgtcgtcgtggtggtgcaggggaagcacatggattgaatcagtatatagccttagctgctgaggcgaagacgcgaggtgagatcgtgatcagatcggtgatgagtgggcggcagtagctgaactactggccgatctgtgcatctacatggcttcgctctgctgggcacaagtacagctgcatgctgcatgcgcgcgtcttctctgggcgctggtcctgcattcatgcatgcccggcaaccactgcatgcgacgcggtggtggtggtggtggtggtggtactgactactggctgctgctgttgccttctgctggagctggacgcatatgtcatatgtgcatgcagtactaccaccgctgcagagcaaaccaattggcatgattcagtgccccctatttagatctgtggagagtctcttgatgctgtgtgtagtagtactgatcatcgctgcatgcaccttgctggccagcagtgacctgtagctttctatagcttcggtgtgtgtatgatcctatatatcgtgcgtcatgacatagcagtatatagaaatagttagctgcatctggcagcagcatcagcttgatagctagtatgcggtgcgcgcaggcctatcgccgatctcattgtttgtctctgtccttggcctgctttcttgcttgcctctcctctccccctcaaaattgcatattgtgcttttctgtacatgggacatccatgcatagagcgcagatcagttctctctgctcttctttatttgtaatggaatgataattgaggtgtttttcgccggagaaattaatcatcaattccgcatgcatgttccagtttctgtccctaagaccaaactttattgccaaaccagtgactttgtatctgaatgttgtctgtcctgatgcgttttaattatctatggctatagtatacacatctgaaagaacaaaatggttgcataataagtagttgagagcatgcatgaattgacggagatgatcgacttcggctttttttgcagcatctctttgagctttgctggctagctcagtaccggcttccggcacagcatgcatgcagccgtgcatattggagtaaaagcatactataggagtaaaattaataacgatcgaagcactgcagactatgtcaggctgctgtgccaccaaatgacgacaagaacgtcgaccgaaattgaatttcgtaaagtacgggggccgtacgatgatcgatgtgcaatgcaatgcaatgatctattagctgttctgaaaattcatgacgtgtggccggtggttacatatgtacttgatgagattaattcaggctatttaatcaaactatgtacacgtacaccacgaggaaatccgtggttttgtgatctcaattacgtacgcgtatagatggtcagtagatccagtaaatgtttgtactgtactgtgtgttcctaggctattagcccagaatgtttatgtatgacaggctgcattttctcccgatgtattgattagacttagaagtagtactagctaatggaattagcagctggtcgtacgtacatgtgtaagtacatctcatgtctcgatttatatggcgctgaatgattatcatctatagtagttcatatttcttcatgacatttgagacccagaacttttttttatactagaaaaatgatgagctaatcacacagtagcgcattccattttttattttacgggtccaattttctgtctcggaccctgtgaatactctttattgattctttttcctcctctatcaatataaagtggtaaagcttttgcttttccttaaaaaaattattgttcactaatatgatgctagctactatacttttgtcccattaattcgatcatcgcgcaggggtataaacaaacggaaagttatcctccgggattgtctattagggtttagctaggtagaaaaatcagactgactaaaattctatggagaggtgggtcaataccgtaacgtaactagtcgccaatctatatattgcacagactattatatatactgatactacaaataataaaattctaaagttatgctaaacatgttgattacctttttgaattattgtagctacttatattaaaagaacaagtcacatatcagtttcaacttactaattaatttaattttgaactttagttagaatatattaacttaataaaataataaaatagagattgcaatctaggtaccatatcacatatattaattacaaatttttagattattaaattagagccatgctattttcaattgcacaatttattaaacatgtactatgcatggtcacgataattaatacgatgcatcaaatcaatggccagagtttatggttaatatgagagctttcttgaattatccagttagtccatgagaccatagggaaatcattactagctagttaaaacaaatcatatgtgtgctatgaaattcttttctatgtgcgcttttaatttatgaaaatcaattaatacaccctcatgtccgtacaatattaattgcacgaggaacaattgtattttgcattttaatttcttgttatatatcagcagccttttccttcacgtgccaatctgccatcagtaaattattatattactgatcatctataagaggaaggccagaaagtacatgaaatacacctggctttggcagatggagcacatgctcaaaagagccatctctgaacaaagcaattcagatggacgtataattgggccatggggtggaggaaaagaaaggtcatgtacactatatacatacgggcccatgtacgacagtgttggatccacacattttcaatctactgctgcgtgctggaaccgttcttccacacacatgcatacatttctgtgggtaaattaattattcctgtttattcaagcaaattaattaatttaatttcctgtttattcaagcaaattaattaatggactagttttttcttctgtgttttctttgacttttcaagccaatattgatatccataacaagtgcatcttttgccgttttggaattgattttttttaactgatctttgcaattcgaaggattttctttttctttgcctggtaaaaataaagtggcaacacaagctaggtagctagctaaacttggatccggacaaggcaaaaagagtagattatttaagctatgagaattaacataccctttcttgcgactgctaatccacaagaagaaaacctaattagacatggattacaaatggaggtccaagctgacaccctccttctgccccaattcacacctacctagcatctccggcgacgtcgacgagcacgacgacaacgaaggcgacgaggacagcaagctcatcggcaccatctcgtccttgcatgccacctcccccgccgccggcgtgcccgccaccgtagtagccagcttgtcagcgccctgcctgccggccgtgctgccgaaattctccgtcggcggcggcacgctccacagcccggcctgcacggggctaccgttgatgggctgcgccatggaacctggcccggcgaaggcgcccggggcggcgctcgtccacatcgggtagtgcgccggcggtggcggcggcggcggcggcggcgggtggtggtcgaagcggccgccgatgtggtggtggtagttgaagaggccgtacatgtgccccggcatgtagcggtgcatggcgagggaggcctggaggtgagctcgcttggcgtgctgccgctccctcttgtgcgcgttctggtggccgcccagcgcctgcgacgtcgggaagttgcggcagcagtagtggcactcgaacttgcgctccgccgccgccgtcgcggcgccgccgttcttggtgccgccgtcgccgccgttgctgccctctgacgtgaccgtgctgccgttggccgcgtcgggggagcctgcaccggcctccgtgggccgcagctgcaggtcgttggagaattcgcagccgaacagccggattgtgtcccgcgcctgctgctgcggcggcggcgccggccggatgaacggcagctgcgagaacgagtcgacgctgcgcatgtcctgcggcttcgccatggccgtctaaccaaccaaccaagctatctgcttctacgtgaaccaaaaccaagaattaaccacccaactcggggcaattcttgctagctgctgctatatcttgcgtctccgcgctgaagaaattggctacgagttggtgtggttttaaggggatatgggagttgtaagctggggcggaggagagggggacgaagagggggaccatgcaagaagtaagagcagagggggactaccaagcttaaagctcccccctctctcatcaccaagtacaaatgcagctgcagtggcagttgctgttgctgcttgtgccctccctgcctagctaagctactgctagtgcaagctatcgcctcatcagtctcacacacaatgacacaaaacattaaccccggcccatttctttcttggcaaatatgggactagtacatatacgtactcacacaagtgcagctatagctagactggttaggtatagctagctacagagagaaattaaaatctggtagtgtttattttctttcaaacttctaaaaattctaacacatcagatgcttaacacatgtatggagcattaatgtggacgaaaaaaaccaattgcatactttacatgtaaattgcgagacgaatcttttaagcctaattacgcgatgatttgacaatgtgatgctacagtaaaatttgctaatgatggattaattaggcttaataaatttatctcgcagtttacatacggaatttgtaatttattttattattagtctacgtttaatacttcaaatatatgtccgtatactttaaaaaagtttagcacacgaactaaacacggtctctctgatgatttttttttttgccctgtccagctttcatgcatctgtagctatcagtgggcatcaagtggggggagatgggtagtgtgactccgtctatccgtcgctctctccctcccctctgctgcctctgggattggctgtagccgggggttctttatgggaggttggcttctttacaacatgagagaccgcaggtggtcctcctggggacggcgacgtgctcgatcgcattctgcttgcttgcttgcttgcttgcaatattgctctctccctccctgttcatgctgctgctcctgctgctgcagctgcatgattactgcatgccggccggccggtagtgcagcagtcatgcatgcatcgtttgcatgcgagtttttatctctttatagctttgcgcggtggtactgctgctaccatcgtttgtagatcgatcgatcgatgttctatggatggcatggcatggcagcaagctgcttcaattcgttcgtttctctccgtttctccgcctgtcgatcgatatggtggtatctttttgacagcgcggttataataatcgtgggcgcgcgtacgtacgtgttcgatcgatggcgcgcgctgcgtcgatagctgggatccacatgcatgcttgattgctggatcgaaagctagctaattgagatagccagctgagtgctgcagttttgagatcatgtcgatctctacatacactccatggctgctacagtagcttttttttcccctcctctctttttctgcaggcttttgtagaccttttctttttacggaattccatgcatgcattcagcgatttttcgcctgcttgttgtagtagtgatatggaaaaagggtaatttcattggagttgtttcagagagatactacgtgaaaagttgtcaatgtcagtaactcactctcctccaggacgtctggtttcatatggcttctgaattaatgacccctatctaccacaaatggaattggccgtagttgagacttgagagatatactactgtcgttgttgtccatctagctagctagctgttcgagtagaaaaccaaacatctcctacacaggtagtatagatcagtcgatccagtctctccaacttgtgatgaacattaatgctcgataggacaagaaaacattttcaagcctcatgggcgcgtaaggccgtagagtgaccgtgtgccaaccgcgatgctatttgaacttgtgttatctctttaagaggtactcgtctggataagtacatcgccaacatcgaaacagtgcacgcatgtgtctctcgacaagtacataatgatgacaccaatgaaatctccatcttaatttcatctgtggtacagacatcgcatatgcatgtcttttttttctttttttaatttcttcatgtccatgaattaagattgtttgtgttacaatatttctactgcctaaattaacggcggctcccaggatagagggacacatggaaaagctgagtgaaaacgcaagctcgactgggactcatgatctcagtaacattttctgacacttacgtgtatgacagatatcaatatcgaccagaacgagctcatcctaatcataatgaccactcagagatccacgtttatttcaagttgagaaatcgttccaaatgatcaaaattccttactacgatttggacagtttttcactggtttaattaacctggcgcaaaaacgaagaataatcaaggaaggaccaccgtgtagctgtcagtagtatgagagccatctatctgaaaacacgaaaatgggaacgctcagagaaaataggagtagaaacaaagcgttgatgcgacacgcaaaagtagcaacatttatgtacatcgacgtgcatctggtcatcagtactcatatgccctgcttgttgctgccttgcttttcttttttttcttctctgcccctgtactggtacatgtcgtcgtacgagttagctagcgggcaacagttgtagccacagcttcgccgacggcgactccgaacccctgcaggtgcaggtgggtgcacgccgctttcacggcgacgtcgcggccgcgcgctcgccactcgacctgccggtcgcgccagatctcgcaggcgtcgccaaatattctcgacatggacttccatttgtgtgttgtagtagtatcatcgatccatcgatcgattgtctcacgcgtttttcaccttttgccccctctccttgtccaaattgacaccgtgttcagttccaaatattttcttcaaactttcaacttttttatcgcatcaaaattttcctacgcacacaaactttcaatttttccatcatatcgttccaatttcaacaaaaacttttaattttaacgtgaactaaacacaccgtgaataagcttcttcttctccttctcatcaggttgcagtaatttattggcagatccaactcccccgatccatccaccacacagttttcctcgtaaatgccgtggccgtacgatagatatattgatggtaggctcgagctagccgtcgataagacacaaacgcttgtcaggctggaaaggatttgacagggaaaaggtacgggtacttggtgcaaataattccgtgccggttaggctgctgttattaccgtgggcaagtttctcacccacgcacacaccgatcgaccgatggatccgtacacttttgcacgcgtgagccgtgtggaaaagtcgactcgcagcgggcagagacgacggtgcggccgcggcggcggtagcatcagcaacgtgatggtcgtcgtaactgccggaaaaggacgccgcttgcatgttattttcggtaggaagcgatcgagatcagcgcgagacgagagctagctagctgcaattctgcggctctgcccaacccaaccatgcgaattgcagtgcatcatcaccgatcgctcgctcgctgtctctctcgctctccttttcgctttcgctgcttccaacgaggggcaaagcacgcatatggatgtgcaggtacggagacgactagtatgcatgctggtatacgtgcttttcaccgcgctagctagctaactctagttgcaggacatgacagccttaccactgctcgaccagagtactacctcccctctctcccacaatagttgtcactttgacttttttttaatatttaatcattcgttttatttgtaaaattagtgcaaatataaaaaaaaataagtcacttaaagtacttttgataataaaacaagtcataaataaaataaataataatttcaaatttttttaataagacgaatgatcaaattttacaaacaaaaactaaaagcgacaagtaatatgggacggaggtagtactctcttcacattttgttttggatttttggtgggaggctagttggttggagaactacctcatatcaggtactacataccaaggatatggatattcatctcttgagatgatatccctcgttacttacatgtcacctaaatagttataaagaatacgaaaacacgataacatagtgacggagcgtggggctcctcaccgggagaccgcgcaggcccccctttgccggttcggccgggggccctgggtgagattctaagctcctagtctgtgtgtggaaggttcgcgagagtggaaacacacaagacacgggcgatgtatacaggttcgggccgctgagaagcgtaataccctactcctgtgttttggtggatctgtgtatgaagaagctacaaagtgcgagccagcccccgatcgttctgggatcgtttttctccttttctctttttttctaagtgggcaaggtcctccttttatatctcaaggggataccacatgcaccatctctccctctctttcttttgtgtggggactcatcctctcttccctccaacttgactcctcttcattaatggacggagatttgtatggctgccgtccgaatgaccttctgatgggacggcccatacctacctccacttccgtcggaagcaggcgcgacgtgggaacatggctgtctgctgacgacatgaccattgtcagaccggtcacaaatcggtcattcttgtccaccacgtgtcagtttaacaatctgcatgttcgcccttcttcatacaatatcttgcctgtaatggttaggatgaagcctggcatatatctgaccgggaccaacgtgccatctccaggagctaacacgccggctccggctagggacgagtgcttggaggctctcatcctgacgggatagggcgaggcgtgcgtcagaccgcctgtcgccatctaacccacgatctgatcggtctgtgactggtcactgaccggataaacaagcgcgctgcactgcgttacatgcggcgtgacgcgctcgtccaaaccgcaataaatgtggttaggtgagccccgctatgctcacctacccaatatacgcggcgcaaaacccacaaggggtcggtgcgcctcggccctcggggccgagacgggagcggtccgacccctcggggagacaaagagaagggcggccgtatcacccttgggcccgaccccccccgagggggttaggccacgtgggtgatcgtgtctgcctcaagtctctaagtcatgatactcccggtcccatgtcaccgacagtagcccccggcgttatgccagggcgatcgccctcctcgagggaagcggtcgggcgtgacgccacttcctaaggcctggtgacaggtggggccggtctaaaaatcgggacaagccggttcgtttttcctggagatatgatgatggcgcttcggtcggcgagcgtaattaacgcgcgcacgagatgttccatctcgactgccacagccgcatatccacctcatgcaccgcaaacgggcgaatgggattagtggaagcgtgggcgcgagaaacgagggggcaagatagtgggcgtgagaaacgaggagccgggcacaacgttggcaagggtataaagtcgccgaggaagagatttgcttccttcctctcgccattattccccttgtcttcgccgcttgcgccctaactccttatttcctgtgccctaccttcgccacacgcgctcgctctcaaacatctcttcttccggcgtcatggcacggggctccgctccgcttgacggtagcgtgctgccgccttcccgcatcgtgagcgagagacaggccggtctgccgcgccgcttcatgccggaatctgccaccggccgggagatagtctcgctgggcgagggatgcccggcgccacgctacccggggcggtccgtcttcttcctcccttttgctatggcagggctggttccgccattttcttctttcttcatggatgttctggagttttacgatctccagatggcgcacctcacccccaacgcggtaatgacattggccatcttcgcgcacctgtgcgagatgttcatcggggtgcgcccatctcttcggctgttccggtggttcttcaccgtacagccggtgtcgccgccgtcagtgattggtggttgctacttccagccgcgggggccggtgctgaaccgctacattccctgcgtcttccgcaagaagtgggatgactggaagagcgactggttctacacccccctcgccgacgaagcgcgcctccgacttccgagccagcctccagcgcaggcctccaactggcgggcgccgatagatctgggagatggctacgacgccgtcctcgaccgcctggcgggcctgcgatcccaggggctcacaggggccatggtgttcggcgactatcttcgtcgccggatcgcgccactccagcggcgcgcccggggcgcctgggagtacaccgggtccgaggactgtatgaggacccaccggggggtcaaatgggactgggctcctgaggacttcaagatagtggtccaacgggtgctgaatctcagctccgtggaggcatccctcattcctcaaggagtcctccccctctgcagcgatccagatcgcgccaacatcctgaccatcatgcaggcggtaggggtgtcggaggagcgggctcctcgaggccacgatggcacgggcgggagccgcaggggggaacaatctaccccgggagggggtcgtgcttctgggccccgcgacgggggcccggggagcggccgccctgccgacgcccgggggaagaggaagcaggaaggaacccctcccccgtctcctccccgagggggcggggcggcgcgtgccagcagcaggcgcccggagggggccacgccgacgtcgcagcccgagggggagcggaagaagaaacggctccgcaagatgggggggacagaaccatcccggggaaaccttatttcccctccaaggtggtcgtttaaccgaccccctcgcaggttcgtcccacgcccatcgtggccgtattcattccctcaacgcgagttttcactcatccatcttgtttgtcttctggtctttcttctgtttcagcgagatcccgtcgcgtccctcccgccattccaagtccggccagtctgaggccgaggacccggcgaccacagaggctcggaggcgggaatctgaccggcgagaagccgtggatcgcctacgggaagccgaggaggccgcccaggtggccgtccgagctcgccaagctgaagaagccgctcgggaggaggccagacttcgccaggccgaggcgacgacatcctccgaggcgacctgtgaaactgaccggcaagaggccgcggatcgccttcgagaagccgaggaagctgctcaggtggccgtccgagctcgccaagctgaagaagccgctcgggaggaggccagacttcgccaggccgaggcgacgacgacttccgaagcagctcgcgacgaggccgcgggcgcatcgcttgggcccactccctcgtgcgacgctcaggacaaaccaggtccgggggacatccccgagtccggcacgtccatcggcgggccaagccgcgcggcatcctcttcgaggcggctcttccccacgccttccgttgctccactgagcgcagaaccccttctgcaggccttggccgtcgcaaacaccacggtgttggacgggttaagtgcccagatggaggccttgcaagcagagcgggtggagctcgacgccgcatgggcatgtgtcgaagaggggtgtcgctcggtggaggccatggtggaggtgggccgcaaggcacaccgccggcacgtctcagagctcgaagcccgtcggaaggtgctgggggagatcgccaaggaggtggaggaggagcggggggctgccctcatcgccaccaccgtgatgaacgaggcgcaggacaccctccgccttcaatacgggagctgggaggcggagctagggaagaagctcgacgccgcccggggggtccttgacgctgccgctgcccgagaacggcgggcggcggagaccgaggtggcatcccggcggcgcgaagaagcccttgaggcccgtgccatggcgctggaagagcgtgcctgcgccgtggagagggacttggcggatcgcgaggccgccgttgccatccgggaggcaacgctgactgcgcacgaggccgcctgcgccgaagaggagtccgcgctccgcctccgcgaggacgcgctcaccgagcgggagcgagctctcgaggaggccgtggccgcggcgcaacggctggcggacagcctgtccctccgcgaggcagtgcgggaggagcaggcgcgccgtaatctggaagatgcccgcgccgagagggccgcgctgaaccagcgggccgctgagctcgaggcgcgggagaaggagctggacgcgagggcgcgcagtggcggggcggccgcgggcgaaagcgacttaaccgcccgcctcgcagctgccgaacacaccatcgccgatctgcagggcgcgctagactcgtccgccggggaggtcgaggccctccgcttggcaggcgaggtagggcccggcatgcttcgggacgccgtctcccgtctagaccgtgccggccggcaggcgggcctctggggcgggcggactgcgaagtacgccgccaaccaggggggcctcgcccagcgcctctcggagatagccgggactctccaacagctccccgaggagctcgagaggacgattaagtcatcctcgagggacctcgcccgaggagcggtggagctcgtactggcgagttaccaagccagggatcccgatttctccccatggacggcgctggacgagttccctcccgggaccgaggatggcgcgcgcgcgcaggtccgggacgccgccgaccatatcgtccacagcttcgagggttcggcccctcggctcgcgttcgccctcaactccgacgaggaggacgatgacggcggagtgggcgacagtggcgacgaggctggcgacccgggcgcatcggagtgagcccccaggcccccgccaatctttaaatagtttcttcttttcttcttccgaggccttcgggcccccttcttgtatagactaatttaatatgcaatcaaataaagaggaaatttttttgtgtcaattctatttgttgtgtgtatgagacgaggatgcctgtgccgcggttcttttgtgtcttggcttgagcaagggctcgtgcccaggtcctagtcctcaaatggctcgggtcggggctagtgcctggggagatccacatgtcgagactggctaggccgggagcgtggtgaccgagggttatgggtgacccgattgtgggtttttgccgattcccccccggagttcaccacgccccggggcacggctcggttctgggccccgtttggcgattttagccgacccgagcccccgagggcaggattgaatacgagtgacctatttcaagtcaagatccttcaaaaggaaacaacagcacatatacagcctttaggaaatcgaaaatgcttttattgaaatacagatataagagaaataagaatctgcatatgtggtagcccccggccagccctgcacgcccgaggggggtgcggggttggccagagcccgaaacctgacacccgatccccctttaggggtagaagcgacgaaggtgttcgatgttccacgggttaggcaactctgtgccgtcgcccgtggccagccgaacggagcccggccgggggacgccgatcactcgatacagaccctcccacattggtgagagcttgctcaatccagcacgcgtttggacgcggcgcaggacgaggtcgtcgacgcagagtgctcgggcccggacgtggcgctgatggtagcgccgcaggctctgctggtagcgcgcggctcggagggccgcgcgccgccttcgctcttccaagtagtcgaggtcatctctgcgaagctgatcttcatcagcctcgcagtacatggtggcccgaggggacctcagggtgagctcggatgggagaaccgcttccgcgccgtagacgaggaagaaaggcgtttccccggttgctcggcttggcgtggttcggttcgcccagagcaccgctggcaactcctcgatccacgaatcgccgtgcttctcgaggatgttgaaggtcttggttttaaggcctctgaggatttccgcattggcgcgctccacttggccgttgcttctggggtgggcaggtgaggcgaagcagagcttgatgcccatgtcttcgcagtaatcgccgaaaagttcactagtgaattgggtgccgttatccgtaataatacggttaggcactccaaaccgggctgtgatgcccttaatgaatttaagtgcggagtgcttattgatcttgacgaccggataagcctcgggccacttagtgaacttgtcgatcgcgacatacagatactcaaacccgcccggggcccgcctaaacggtcccaggatatcgagcccccagacagcaaatggccatgaaagtggtatgatctgcagggcctaggccggctgatggatttgcttggcgtggaattgacacgctctgcatcgccggaccaggtcgactgcatcattgagagctgttggccaatagaaaccttgacgagaggctttgccaaccaaggtgcgcaaggcggagtgggctccgcattcgccttcatggatatcggcaagaagctcgacgccttgttcccgaggaatgcacttcaggaggattccgttagccgcgcgccgatagagggtcccttctaccagcacgtagcgtttggagatgcgttggacgcgttcactcccttcgcggtcctcgggtagagtcttatctgtgaggtatgcttggatctcagcgatccaagcaatcaatctaagggagctgggagcgctcccctcgggtcccgaggcctggactccgacgggcatcgggggcctgtcaggcgcgtccgtctcccctaaggggtcgggtcgcgccgacggctgggcaagcctttcttcaaaggcgcccggtggggtttgggctcgcgaggaagcgagccgtgagagttcgtcggcaaccgtgttatcccgtctgggcacgtgccgaagctctatcccgtcaaaatggcgctccatacgccgtacttggcgcacgtaagcgtccatctgcgggtcagagcaccggtactccttacagacctggttaacgaccagctgggagtcgcctaacaccaggaggcggcggatccccagtccagctgccaccctgagtcccgcaaggagtccctcgtactctgccatattattggtcgcccgaaagtcaaagcgaaccaaatatctgaggacctctccgctcggcgaggtcaacgtgacccccgcaccggcgccctgaagagacagggagccgttgaactgcatcacccagtgggcggtgtgaggcagctgcgaggggcccgagctggcctcggggactgagacgggctcgggagctggggtccactctgccacaaaatcggcgagggcctggctcttgatagcgtggcgtggttcaaagtgcaaatcaaactcagaaagttcgattgcccatttcaccacccgtccagttccctctcgattatgcaagatttggccgagggggtaagacgtaaccaccgtgacccgatgtgcctggaaataatggcgcagtttcctcgaagccatcagaatagcgtaaagcatcttctgggcctgagggtatcgggtcttggcgtcccggagggcctcactaacaaagtagacgggccgctgcacctttcggtggggccgatcctcttcgctaggggccacatccctggggtgctctttgtccaagcggcctcacggggtgcactcgtcctctgtgccgacgacctcggggtcggaggacgacaggggcggccttcccacagtggcctcggggccgtcctgggggtcgggggctcctggcgtcgtcggacaagcgggcaaagggccaactccggtggtcaggggccttaggccaccgttcggctcgggggcctcttctccctgctctctcccgggtcgagtcggcacagggttagcctcggggtcagagggcgataggtgcggccttcccgcagtggccctcgggccatcctgggggtcgggggcacctggcaccgtctgacaagcgggcagagggcctgctccggtcgtcgggggccttgggccaccgttcggctcgggggcctctcctcccggctctctcccgggccaagccagcacagggtgggggtgcgcggaatgaggattgtcctcatcgcgctccacaaccaacgccacactaaccacttgcggggtcgccgctaagtagagtagcaagggttcatttggctccggggcgaccagaactgggggagagctgagatacgccttcaactgagtgagggcacgttcagcttcctccgtccaagtaaacggcccggagcgtttgaggagcttaaataagggtagagccttctctcccagcctcgatatgaaccgacttagggcggccatgcaaccggtgacgcattgcacatccctaagtttgctgggggggcgcatccgctctatagctcgtatcttctcggggttggcctcgatgcctcgggcagagaccaaaaacccgagaagcttgcccgcaggtacaccgaacacgcacttatcggggttcagttttatgcgggcggagcggagactctcaaaagtttctgctagatccgagagtaaggtctcttggttgcgcgtctttacaaccaagtcatcgacataagcctcaacattacgtcctatttggctacctaaagaaattcgagtagtacgttgaaaagtaggacctgcattctttaactcgaagggcattgtcgtataacaataagttcctatgggggtaatgaatgcagttttttcctcatcctccctagccatgcgaatctgatggtaaccagagtatgcatctagaaaacacaaaaggtcgcaccccgctgtggagtcgacaatctgatctatgcgaggcagggggtaagggtccttaggacatgccttgttaaggtcggtgtagtcgatgcacatccgaagcttgccgttcgccttgggaacgaccaccgggttcgccagccactccggatggatgacctcgcggatgaatccggcctccagaagtcgcgccacctcctcgcggatgaaggcttgacgttccggggcctgccgccgtactttctgccggaccggccttgcgcccgaccgcactgcgagacggtgctcaatcacctccctggggaccccgggcatatccgccggtctccatgcgaagacgtcagcgtttgcccacaggaaagagacgagcgcgtcttcctatttgccgtccagaagaccaccgatccgtgtggtcttggacgggccgtcgcccagggcaacctccttgaccgggacctcgtcgcatgtgactatccgctgcctcgggacggcgggggcggaggtgccaagcctctcgtcgcctcccttgggcttggacgcggcggcgaggtggtccgcgcgctgctccatacaagcaagcgcgactttgaggtcgccatggacagagatggggccaccggggcccggcatcttcatctggaggtaggcgtagtggactgccgccatgaacttcaccaacgcgggcctccctaggaccgcgttgtagggcagactgaggtccgccacatcaaagttcacccgctccgtgcggaagttggcggatccaccgaaggtaaccgggaggtcgatatgacctagcggccaagtgtgacccggcgtcacaccgataatcggctgggacggccggagcaccatccccggggccttgatagcgtcaaaggctgcgggggaaaggatgttgagggctgctcccccatcaatgaggacacgccccagcttcacgttgcaaacagtgggggaaaccaccattgcgatctgtcctccccgggcaacgcacggtgggtggtcggtctggtcgaaggtgagggcaacctccgaccaccgcccccggcgcgtcgcctcatgagtaggggccgcggccagaagctctcgcttcatggccttgaggctccggcgagaaacgtgagcacacgctcccccatcgacagtggcaatggtggccccaggctcttggaaacctaggtcatcatcgccgtcatcgatgtcctcggcgggggccttctgcttggcctcacttcgccgattgccggaaggaaccgccggggacttgccctctcggcgctcctgcctcctctcctcctcccacttcctcgtccgctcagccaaacttttgactgcgcggcagtccgcgaggtcatgaagggaggtgttgtggacgatgcaccacatgccggttgggcgctccctactgagagcgccggcctccttcttttggtcgctcgcaggcctcccctttcgggtggcccacggagcgccctcgacggcgaggacatgaccctcgtcgtcagaatgggctgacctcttcttcctcctcctgtcacgccgccctgtccgagcagcggatccgggggcggccgaagctgccacaccggaaccggaggggttccaggtccatgcctcttccttacgagccactcggtccgcgagctgaaaaagctccgcggtagtctggggctctttggaggcgatcttttcgagcatgcggttgtgccgcacacccccctgaacgcgtagatcaccgcgtgtgcagggatgcatggtatggtgttgcggacttgacagaaccgctgaatgtaggagcgaagtgactcatcatcccttcgctggactgcatgtaagtccgcttcttcacctgggcgcggatatgtgccttgaaagttcatggtgaactgttggcacaaatcctcccaagagtggacggacgcgggtggcaagttcattagccaaccccgtgcctgtcccttcagggccatgggaaagaaattcgccatgaccctgtcgtcacccctggcggcctcgatcccggtcgtgtagacctggagaaactcggcggggttgacgctcccgtcatatttttcggcgatgtgggccggaaccttgggggccaacggacgttccgaaggctcgccacaaaggctctacagccgacaccaccaaccgggggcacggagggctgatccccgcgtccgtgttgatgtgacactccggacgaggaggcgccctccgttgcgtgggcagcacgtcggccattacgccggcgctcgatactgatgcgggcatccggccccccacgcagatcttcctgggtcggaggcgctgacgaaggagtggcggctgaatggcgagcaacagccgccgctcgccgcgccctccgccttgacgacacggagccggtggtagcagcgccagaggtcttggtggcggaggaccgcccaccagcacctaggcgctgccgtgccgtcatgaccaagttggccacgtcgtccaaccaacgttgggctggagactccgggtcagggacaatgggcgggtgacgtaggagcgcgccctggggcgtgctgccgtcgccgtagacaaggaggcgacgctccccatctcgccgcccttccccatcacccgtggatgtcgaagtcgcggatccttcgaccctctcgagcgcctcctcctgcctaggactttggcgtggagggggcggtggagtacgagctcgacggcgtgggttcggctccccgtcgtcaccgctaacactcggagagaggttgtgcgcctttgcttgttcggccattgggctgaacaggaaaagcttggcgcacacgaaagaatgcgagagcttagaaaaacacacgcagagccccctacctggcgcgccagatgacggagcgtggggctcctcaccgggagaccgcgcaggcccccctttgccggttcggccgggggccctgggtgagattctaagctcctagtctgtgtgtggagggttcgcgggagtggaaacacacaagacacgggcgatgtatacaggttcgggccgctgagaagcgtaataccctactcctgtgttttggtggatctgtgtatgaagaagctacaaagtgcgagccagcccccgatcgttctgggatcgtttttctccttttctttttttttctaagtgggcaaggtcctccttttatatctcaaggggataccacatgcaccatctctccctctctttcttttgtgtggggactcatcctctcttccctccaacttgactcctcttcattaatggacggagatttgtatggctgccgtccgaatgaccttctgatgggacggcccatacctacctccacttccgtcggaagcaggcgcgacgtgggaacatggctgtctgctgacgacatgaccattgtcagaccggtcacaaatcggtcattcttgtccaccacgtgtcagtttaacaatctgcatgttcgcccttcttcatacaatatcttgcctgtaatggttaggatgaagcctggcatatatctgaccgggaccaacgtgccatctccaggagctaacacgccggctccggctagggatgagtgcttggaggctctcatcctgacgggatggggcgaggcgtgcgtcagaccgcctgtcgccacctaacccacgatctgatcggtctgtgactgatcactgaccagataaacaagcgcgctgcactgcgttacatgcggcgtgacgcgctcgtccaaaccgcaataaatgtggttaggtgagccccgctatgctcacctacccaatatacgcggcgcaaaacccacaaggggtcggggcgcctcggccctcggggccgagacgggagtggtccgacccctcggggagacaaagagaagggcggccgtatcaccctcgggcccgaccccccccccccgagggggttaggccacgtgggtgatcgtgtctgcctcaagtctctaagtcatgatactcccggtcccatgtcaccgacacatagattaatatgaaaaggttaaatttcacttttacaagttgcaacaaaaagaaaaaataaaaatagtaatagtaatttacattcgcagctatatttgttataacttatagaagttgaattttaacctgtatgtttgtggagtgatacatttcatgttaatctatatcttagcattttgtttcaatttttttatgactatttagatgatatgtacaaaacgaatgaatatcctctcgagggattaataaattttcccccataatgcttcatatgctgcctctaaaaatgtcacattggatagagtgatgaggtgaaggacagaagtgaggagagagattatgagctacttctaaattaagaggtaacctccacacaaacttaaaaaaagatgtgtgagtattagatgattgacatttgtgtgttggaagtgacatattgtatatgttgccttttagtttattaatgaataatatggataaaattaaaggtggcatttacgtctatcatagtatttgctcttgtagtcgccgcggagtccggcaaataactgtcataactttttcttttcttttcatcttctttatatatggctgggtgcttaattgtacatagttactaagtatatatagttagcttaattatcatgcctggtttatgtatcggtatgtctctgaattggtctcgtgtaaaagatttgccgtttgatggaatttcagaagttgccgtacaagaccggtactactagtgttggacatgtcaactgaaagtcgtttggcccaactgagaaagtcgaaactggctcttaacagactagataccttaagaaagcaaaagaaggaacagcatactgacctaattaaaagctttctgtgtcactctatggttcaattcccgcgttttgggttacttgtgcacaacaaaagtactagatcctggagcacaaaaatccaagctgcaaccgagggaggctcaatctacagagtatatattcctgattatctaaccggcctgtcataggtggtgtttggttggagggactaaagtggagctaaactttagtccctctcacaaaaatataagtccctatggtagggacttatgtttttgtaagagggactaaatttagtccctagttcccaaacacccccatagtattttcaggctgaactcttgttgcttgggtcatgtgttgcttgctgttgattaatgagggtgctctgcttttttgagcacttgtctgcatcacatcatatgccaaagtctctccacttaaagtaagctagagacggtactccaaaacaatcatcaaattccagctctattgatggagctccctgtcccctttagcttttggatgagactttggatgctgccgcttgggaccaaacatgcagctagccacagcccaattaaaccttgaacgcagtaatcaggatgtgtccttttccttcttttcgtgtgccatcaatcccattgcctcatagatctatgcatcaacaagcatcagaaatataatacattttcttagtgaaaaggcaaaccgaaagaagatcagaatccctgaagaaaccgacatgcacaccatgcagatagtactaaactggagcacgatttaacacgttgccactacaagataatcgttgtggatccaccagtttattccagataaattaacactgttactctgatagatactcctcctatctctcacctgtctctaccatatatatatacgtggtcatgaggtgatcactaatagtactactatatatagttgacggcaaatttttttggcacagaagatctgaagatgcacacatatgctgacaactgcaggggcagtgtcaagctgttaatgcagatagggaaggaggtaggctttgccaaaggctttttggtggtgttcttctcaaagcataaatatgggtctgatcttgctgtcgggaaggagatctccaatcctccaaacctaggaccacacctactatatggcgcagctagtcatcggctcacctcctctcatcacccttcaggctcagatcaatctgcatgcacaaacaagcaagattcaactagaaagagcaatagtagctggtgggtgtggagtggactcgtaccgctcacatgacccatgggtgtgagcaagagctggagatatttaattagtctgctttgattggttgggaagagccatagaagccacaacggtgggggtagaaagttgctttcaataactgtccacaactggttggagtacccttgtcgttgttgaaattgcacccctaaggctaggattagttcctaactttttcttcaaacttctaactttttcatcacatcaaaaaacttttctatatacataaactttcaattttagcgtagaactaaacacaccctaattatgtctaaggggaggcaggaatgtccaaataacaagatgaaacactctgtgattttacgctgtttggtcacttaaacatcgatctgatctcttttttttccaacaggccgctagaaattgaattaattggatgatctgaaagctctgtttatctgaaaattactgtatcagagcatgcagaatatatatatatatatatatacaacgaagaactagtataattaattaagttgttttcgggggagcatatatgtttctgttcccgagaagactcgatcaggttgtcatcgccgtaaccaatcacgtcttatcccttaatgccagcatgtacgtacggaaaacatagtaggatcagagtagttgctactccagctagctcatgtaaattctctcccggccgggcacgttcgagacaagatagtacacccaccccacagttcatacccaattcaaactcgcatctgtcgagctatagcttagctagctacctgcttcacaactcaggagttcaacatcatcatcgttagctcccttgaatgaatccccgtgacccggagaacgtgtcgtcgtccgaccgtttcagcgtcgatcgatccaacgacaaaagacgctgcggccggcggtggagccagcgcgctagctagctgcacgtactggagttacgtacgtacgcgcgcggcactgcaccgcggtcgacgacgtcgtacccgctccatccgtgcatgcacgagttgcgccccctccccccctactacccctgctccggctggtaggggacacccctcacatcaacccgcgcgccgcagcaaatccatccatccatccatgcaaatgttaggttcaccggccggctcgtttcgctacagatgcgcggattgcgccaccaccgcgagcgcctgatcgctctcgcgtgtcccgcgagatgttgggcttgtggctctcgcgtgagatgccggtgcgagccgtggagtacgtgggatttgcgtgtgagacgccgtaaattcacccgacccaccagcagtccaggcgtccagcacgttggatagggtgggggatgctttgcttattaagggaagaacatatgagcagtagtactgggcgggcgcgcttgctaattaattggtttttgcgcttgctcgtgctcgcatgtggccgcgaactaccgtgaattaatgtgtttggaatttcgacgtgatcgtcgcgagtcgttattcaaaatggagtactgcgtactagtaccagtgtgtaactgtagtgtgttcggttaggttcctgtacgtggaaccagctccagcaactggtgacctaagcttttctctagtttctttgtacttgttgctatttgcacggctgcctgcagttatactaccaagcactttaggtacggtacgtgcattgtagatgtcacttgtttgttactgcttcgtggagaagtgataccgatttcccaggagttaaaacttagcaaatcttgtacaaaaaagtgctctcgtttgaaaagaaaaaggtccatcaaaatagcatatactagatgccatatatacgattttctatcaatcagaaagatattagaaaaacgtaaaactatgtacagttacaggctacaacaatctgaatgtctatgtaaaaaaaggtgaaacaacctttctaatctactttcacaggtcacaacgaatacgaaataaccattgctcggacagggagtacagtacatcagcatccccattcaccggtctcgaaagctatctctacgcaatttatgagaacgacagcgcgcacagatcaaagtttgtacaccccgtccttgatttcagtacacaaaggcccggaattcaattcctttgccggaatccgtaggtggtaggaaaagccgtgcatggccgggaccccggcttgtagtactcgtacacagtagtcgtactctacatcagtagtagatcaggccgtttgctgaacatgcccatgacgcccattcaatgatacactggctgtagaggagtagctttttttttttctatctcaaacgacatgcacagcactctgagcatcatttaaacgtggtcccaaatgtaagcgctaccctctgcatgcatgcccgattcattcgtcacttgcttcatctgtttcattgcatcatgcatggcacacaaaaggcaacgacacatgcataacaagcacaaaaagacgcaaacgaagagaggatagggtccaagtgctttgcactagggtcttctatataattttagaaccgaatgtaggagaaagattttcatcatctaactatctaagggatatctcctcatttttttcatattatttatatagttaaaaaaataaaacaagatatatcaatatgagatatatcactctacatgtcaaactcaaattttacaagttgtaaaaaaacttatattaaagtttgaggcgcattttattattaaagttttattttggatcaatcttaaaccaatctctttttactttggactgaataattttgtcctttttttttgattcaccaactcttcaatataaaaacaaagcctatcaaagatatgaccagtgtatagatggggaagtttattggtgtgctagagccgatttacttgaggtttgtgtgtatggaacaagttgtttgtggtggtccaaactgtgataaaattatttggtttaaagtgaaactttagtagtaaaataatctcagttcagttttaagtttttgaattaaaactaaagacatgtccattgtactgcggataacacatgaaaaaatagttcataatttccaatgacaggttttatataataagagttttgaatatatactatctatgaccattataaggcaacccacctaatcagtggatatgtcccacgaaaaaatagttcacagtttccaacccacgatcgagtgagcaatggattttttttttgcgggagagagtgggaagtggatttggttgaataggtggggctagaagagtatttttcatattttgttagtcaattatctgttttctttacctcacttaatttgggaccaccgaacggacatccaatctaggggtaaatggattattcagttcagaaaagtgagggcaaatcgcaaagtctgaaaagtaagggtaaaatcacaattgcactaaaaaaacatgagtaagaacacaattgtctcttccttaattagaggagatataatagcatactacaagtcagctataaacacatatccagaagaaaaaaaatagagagatatgactagcgggctacagatttgtagtcacctgcagcacagactctatgacgcaatgtgtgtatgacaggtggtaccaactattaatagcgtagttatttatatgtaactattgtatgaattggctattaaattgattatagatgatttgaaactggtagttggctatactattaaactttaaaattgctcttaatctcaaatgaaatttatgacgcgcgaagttgcactccgttctttattcagtgtctgccttgtacatgttcctgctccatgtttgtaggatctgaaaatcaaactgcctgattaaattctgcatctgacgttgtaagatgggaaatgtttacacacagttaaaatacagacaacgtacatggatgctatatatgctacgacacaccaattcaccactatgcatgcaagcaacagcatcgtcccttgtccctagcttatctggaaaaattaattcaataagaacttcgtagcccgagtcccgatcgatcgactactatcgcacagcgcacaatatttgccagtgccggcatgagagcgacaccttagctaatgcatatgcaagcttcctcttccgagaacatggccctggtccaacaataatgtgaaagtactgcatctgttgatgcatggttaggtgcttgatgtggcttgtgtcttggcgtaatcctgagtttagttgccttcattaacgccaaaaaatctactcgatcgatctcactgattggataccatccccctgcatgatgcacggacagtcggcggaggtcactgctgttgagatggttctagcccaaccacaccacccatggggacaacatctcatatcgatctaatcagatcattaccacttcgtcattggtcacacccacacacatatattcccctgtagccgacgttgatatgacagtctaggaacatacaaaccctgatcctttcatcaccagtactaaccagctggtgtaccctctctcgtcacgttcccacttttcccaaagatgggagagaattgagaaaagagagaaaagaaaggaaaagaacaactagcttgatctgtcaatcagatggatctatcaaaccttttttcttaaagagagcacgaatttaggacgcaaaccatgtatatttcagtcttgtctttcttggatctgcagctcgcagccgtcgccgtcgtcgcgtttgcatgatcgagccgtggtacgcggtgccgcgcatgtgtggcgcttcgcgggcctctcggactacaccgcgcgcgccgccgggggcgtacgtcgtcgtcgtcgatggcgagtaaacgtcagagagagatacggaaaacgaacgcacgctgctctcgtcggtttcaccgtctcgttggctcgtcgtgaggcatacgttgcgttgttgttttttattttccccggcttgaaaggcacagcgcttgcagagggggaggcgagctagggagtcgatcgggccggccgggcgtacgactccgaagagtcgcatttgcgttttggggcaacgtcgctgtgcggctgagtccacacaagtgggggggggggggggggggggaggcaaaaggtgaggaataatgagagatcgctgtcccgggaaggcaaatcacatcaggattgcagcagctgagggcaaccagaatggagcctttcagggcttaagctcaaagtttttttccttctttctcagatatatgcatgcatgtgtgcctgtttgtggcaaagcctgtgtcgggtctgtgctgttcacaccactggctggctgaatcttcaggagaaaaaaaaataaaaaaggtgcacatcttgtgttacttttatctcgcaacaacttgatgataattctgctctgatttgattcgggcctaactcgccagacacgctggcccacctgtcagtgatctagcacgtggtttgcagctgcaacgcgtaggacacaataacacaaatccctctctctgactgcccccaaacatgccattagagcacctcgctggaattcagagctagtaggatatggttgttggtgatgcctgtcagcgatcgagcttaattagtccaacgctggcacaccactgcttcctgaatggagcagcgaagtactccaagaagcatcacgagggagtagggacggccggggttttggcaactgggcatgcaccccagtttcccgggcgcgacaggcaacggctgtacgcacagcgaagcctgctgctgcaaggccgatctagctactcactacacaactgaccgtggccaatggatccatcgttaatgccgaattagatgtcggttctttgtcctgccgtggacgattgcaccgtacgttccctgtgcttctgctgtttttaacctttgccgagttgtaaaaaaaatccgtggtttgtacacgtgtcgtgaactgcaactgagaaagaacacaaacaaaggcccaagccaatgaagcaaggcccacttgatgcaagcccagattagcccacatcctgaagcccaatcataaccactgcctaaaaaaagctcaaacctatccgtatcagtatcatgattcatgagtacttctctaagaaaaatcagtatcatgagtatggtattgattgtcaatatttttggggccataactcaagaaacataactgaacttttgcaccatcattatatcatgctaagaaaagaatttgctgatacaccatcatcgtcacatcgatcgctgccatgtccatggaagcaaatgagtacacatatcatttctacatcacaaatatagcccagctagttctttgatccagtcgcggttggtgccgaggcagacggacagtactcgcagtcacaaccaactggaccgaagcaggtgccggtgcccttgtacatcctggagcagtccgcgttgcatttggcggcgctgcatgccttgcccggattcaggataactgaactacagttcggggttaaggcagatatgtctgcagatctcgccaccatcactgcagatacaagcgatagatttcttgcttaggagttgcgtgatctatgtttgcgaaatcaacggcgagagaaggtgcttaattacctgatgatagagacatgagggcaatggcgaccagcagcaactgaacagtcctcatcctttgtttggtgttggtgtcgaaagctagaattggaagactgatgagtgattttttcgcgaacgcactgatgagtgatgagatgagatgcgttgttgatctatatggcaaatgccatgattttatagtggatccatggggatgctctatttttagaatcacttccaagaaagacaacagattaatatggattacattacaatcaataggcttatatatgaattataatgcttctaaatacaaatcatctatttttggtagctttgatggctgtgattatatactactaattcccaacaatggatagggttatccggttcatatatgtgtcttgcattaatttttgcccatacctaaacgaggctagtaccggagagactacatgcaagaaccttcaaaaggcctaacttgtcataggcataggatggcagaatacaattcagaccatgccttgtccagagtcgggccaagctggttaactcatgctggagtcgtccggctttggaatcttgagaaagatgtcggtcctgtttggactttggagctggttaactatggataatcgtgggagctataattttagaagaaactgtagctgttaaaagctacagggaatgccactgcttctgctgaaagaaagtggcaagagtgaagtatcctaatttcccaccggttgcttgagcattcgtcactggaaaatgccatgcgccaattcactattcccttcattccaaaatataagttataaccacccttaatccaaagaccaagaaataattattatcatcttgtagtttggaacattctaataaatataatgcatgcatctaatagaattatataaggatttaaaatagtaataatttaatagagaaaatgtcataattaattgcatgcttgcatgcatgacttatattatagaacatctaagaaaagtggttgtgccttatattatggaatggagggagtatagtttctaatgtgctaaaaagacaactcaaaccattatttttatataaccttgagccaccttagcaggatttaaggttaaacaaatttttttgcttaatcaaaagtgtgcaccttcacaaaatatattttgcaatatatactgcagagcaagataccgcaatacgaggatcacaaatggattaattccatgctactgcttgatctctgctttgccacctacgatctcaaatctcaaattacgtttttgtacatctccatgcgcctgagctcagattcaacccaactcttcttgaagcccccctcaattctcaccaaagttgcgtggaggctctcgggcatggtggcgagctgctcatcggtgaagcgatcgaggaaccggtatcggtccggcatctcggtaatctgcctgactcgcaaaaagggctgcggcacgaggggcatcctgtcgccatagcccctcgccgccacagcggcctcatggcgctggcgcaccacggcgccgtcgctcgtcactgtggcctccaccttgagtcgcttgttcgcgcacgccgcctcgccctcgccgtcgctcgtcactgtatcctcccccttggggcgcttgttcacgctcacgcacgcctcctcctcctcctcgaggaggcttatccacggatctggggtcatccacgccatcgctctctattggaacttggaaggcgaaacctattagtaccagatttaattgcgaaagcaatctgtagatttgggtgaaaggggaacggaggacacggacatataaagtccggcccaacccaacctctatcgggtcggattctgtctcgcaggctgagctcggaacagcggccatcaatgattaggccggccgcaggccgatgataattttgacagccctaacctaatatcctttatgcacggccatgctgactgttcatgtgcttgactaattttgacagccttcctcgggagaattaattctgcttcactctacgtaattttaatttgagcaaaggtagcatgatgtaccaaattttacactagatttttagtacctcgtggtatctcctcaaaaaccatagaattgctcttttaatttaggttacatagttacatcattgataaaataggaattaagattgcaacgaagatgcggcataccgatgtggcattttcattggttttttttattaaaaaacacagtacaaacataaggctggattggatcggtatatctaaggttgacaaagtcaccatgaatgcatcgtctaccactgaaaaataattagatataaatgcgagcattgaattggatcggtatattttgagattgacgaagtctacataaacgtctcgtctaccactgataaaataattagccataaatgcaagggtaaattgattctatcacaagcaacctaatcagttgaactaagttcacttcgcacattttcgttgaatctagagactaatattgagctatatgataaattttgaagatttttttataatataaaatgttaggaactaaattgaggaccatattaactaaattcactctaaaagaaaatctgcaaaaacaaagcaactgaactctctcgtggccaacgctgtaatgaagcacatgagaccccccccccccccacacaccaaaaaaaaaacagagagaggttcacacagcgttctatttagcgctgctgaaaataggacaatcccatataaatagtctctttatttaatcatcaacatctctccaggcatcacaaaatttaacaatcgcacgcgtcacactgtatgtaaaatttaagcctgatcgacgcgtgagtgatgatcggcccctgtgcacacagtactgcacatcgtcgtcgatcgaccaccgatcgatcggccggccggccgggttattagttgctcgccggcgccggggaagcgcaggtgtagacgcacttgcactgcgtgccgatgcactggcccacgccgcctttgtactgccgcgggcaattggtcgcgcactcgccgctgtcgcacgacggggcgcccgggttcaacaccgccgagcaggtgtcctggaagtacttgggccccgctatcttggccgccatcacgcctgccatttcgttcaatttttttgaattttgaagcgatttcgttcaaggttcaaaccaagctgatcacaagccagagagagagagagagagagagagagagagagagagagagagagagagagagagtagtagctccgagtgttgtgtactacctgatgaagatgatgcgacgaggaccatggccaggaggaggagcagtgctgcgtggaaggccttcatctctgactctgacgccattggcttttttttttccttgtgacttctgctactgctaccggtgcttagctgcagctttgtttcttttaggtgtaccgaatgggagtgtggcgtttatagtgttgttgttcgtattatttttggaatcacttactacagtaagttgtatggatatggataacgggaacgggtttaatttcaggagtaattggcattgatactgctatattcgtttgtgctgatctttaggattatatagtggccttgtattaagggttgtaccaaattggtacctaatcaatagtaccaattaaaggtgatatttcggtgcattttaatttgtcaattttcacgagaaaaaaaaagcgcatatgctccgtatggcatggaaaatgtttagatgggtcatagtcaatccaaagcatatgttaaagatgttatagcccataatgcaagtagccagaacccaacagtcatagagaggtaatttctagccttaccaaataacgaagtgagattagggcgagaggtcaatcttgtactacgtactgattggaacgaggggaccgcaacaccaagctcaagccatgagctcctagacacgctgccccaacccgcaccctcatctcgcagctgcgccatgctccggggtgttgcgtcctttcttgtagaagagtcatgtctccttgcataaggacacaaggcgttgcttgtttggcctgattcctacaaggagtgccggggtacgtgacacgatggagcattggccatggactaattcaccaaatggataataataaaggaattgctacacttcagtcaacaaaaaacctacctctaaatcttgcaaattttagttcactggatgtgtttcgcaattcgtgctccagctgcttcttctccaactccgacgaactcctcttcttttccggtgccggcgacaacccaaactccggcgaagaattagggtcctggggtggggtggggtgggaagggtgggagggggagggggaagaaggaagagttcgccgggcttaaagggatggccgggggaggcggcagcccggcggtgggcggcgaggcaccggcggcggcaccggattcgcggggctggaggacggcggtgggccggcgttggtggcgggggcatcttgccgccgacggctcgaggaggatggaggggggaggaggaggggaaggacgagggggaggaggctggccgaggggcctcgccggcgccgttgacgccctctggccagccggcgaggcgggcagcggcgcggtagggcggtggcggctgggaatcgcgtgcgagagacaggagtagcggtggcggcgcgatctggatgggggaggaggagaggagttagggttaaggggtctgcacgaatcttgaagcatatccaatgatctaaaatttgaaagataggaggtgggattttctgtcaacatatgtgtagatgcactcttataaaagacaataaacatcacctgatctatgattccttcaaaaaaaaaacttacttgaatgtaacagtcgacacttgacaccactctcataaacttgcttcattgagcagttggctcaaatgacgttctgacgttgataggcatgtgattgtttcattctcaattaagttgaatcaaataggccctttttccctttttgagtcaaacattcttagaaaaaccttccgcatgctttaatatcttgttggctaagtcgagcttctaatgagacatgcatacaattgtattactttgtttttttaatataagacatagttgtcattcacatgctccatggctcttggattgtcacggagtcgtcctagagctcgggtgagaaggagtgggtaactcacccaccacggtggcgacgagtttcccctgacagcggtggaggtgacctcggacgataaaactccagcagaggacctaggttttatagttttagggttagaagttggtgccatggtggagcagggtaggggttttggagggtggctttagagggatggatggggtggtggaaacatcttagtgggtgcagagacaggtaggtgacttgggtgctgcttgagccgtgaggatggaaggtgacggttggcggaggggatggatttagtggcgctagccgtcggagatgagaaaggaccgggacattgctggaatgggagaaaaaaaatcaaacaagagaggggtagaagggaggagttgaattgcatgcttggaaggggcatgccagagccattggcggcttccggtgccgacaaggctgagcggtggcgcactgggatgggtagtcagcagcgcagggtggggatgtagtgaaatcgtattgtgaaatcccttctttttcgtgcacgagaaattccgaatcattgaataagttgttatttttcttggttggtgtgattgtgtcatcttttcatgtacctttgtttatttctgtcgtgtttgagtttcaagccaaaaactttgtaataagtggatttagctttagttgaagcaaaggtcaagtttaatattaattattaaaaaaaggtatgttactatgaaaatataattattgtagccaatacttaggaggtcaaatggccttccacttgaggggtgaaacgactagctttcccatgcaaaccgatgtataccatgagaacgggaaccctttctttcatttatttgttcatcaaacgcctctccgagcataacaatactgacaacgcgcgggtcaccctgtactaaaacacaggagtaaatatattaatcctgattcaacctctgtaagctaagtacgtgacacgcgccgccgtgctttcccatcgtcgaccaaccggttagtttctcgccgtcgccggtggcggcggcggcggcaggaaggcgcaggagtagtcgcacttgcacttgttgccgacgcactggccaatgccgcccctgtactgccgctggcagttcgccacgcacaagccgctgtcgcacgtcgggtattcccggttgatcacctccgtgcaggtttccagctgcgccgtcacgccacctgccatttcgttcaacccaaccatgcagctgatcacaagctagcctcgatcaccaaaaaaaaccagagatggatacaagctagcgccaagtattgcgtacctggtggtgatgatgatgaagcgacgaggacgatggccaggatgagcagtgctgcgtggatggccttcatctctgacgctgttgatttttttttttcacttgtgctgatcgatgctactgctaacggtgctagctttgtttggtggttatagtgttgtttgcagttttatttttggaatcacttactcaaataggatatggatagcaggaattaatcgcggtgtaatcccaggagtaattagcattgatatggtatattcgtttgcgctgatctttttaaagggttgtatagtagtatcaactaatggtgatgtatcggtgcttatcgtcaattttcacaaggaatggaaagcgcatgtaccgcgtgacatggagaacgtttggaatataaatcatcgaagagataagtagtaggagtaaaggctgcgctcgttctgcctgtcaaccgaaatttgcggtggcagtcaaaaacaagataagtcactcatgtatgattaatccgatattaattgttataaactttaaaaataaatttgttttttataaaaacttttatataaagacttttgcacgaaatacactatttcgtggttgttaacgaccaaatttggtaatatcaacatcggaggtgaagatgggatcgagatcggctacgactagaatcggctaaatctgaatcagactgggttaggtgatatagccgattccagcaatatgactcgtatccaacattgggtttgagttgatatgcttcaagatgattgctgcacgtgcatagagtcctgaaaaggcaattgtatctattaattaggatgttttatgtaatttccttagagatatgcttagggcaaaagtctgccgcaaagacttatggtatcttagagtttgttagagataatagtcgtgtccgatatggacatatcttgtaattctcgggtataaatagaccctgagccctatgtaaaaaagacacacacgttcaatacaatttcggcgcatcgccatctttttgctttagttttatttcgacgagttcttgctttcgggttgagctgcatcggtttcgatcttcaacaagaggtaaaacttgttatgacggcttgtgttctcgggattagtgcttccatctttatgatactctaatcttgtttacgtaattcgtcgagttatcatatatcatacataatctctggcaatatcgctatctaacctataatcggctaacatctgttagtagagggcagccgattaggttagattttgatgttgatttagattatataagaaatctaccactctatgaaacttccagcggcttgattgtctagatattgttcttcttttcatacttaatgctgcatcagttgagtttgatctattaagtcgtgcttagaatatcaatctctagcctgccttctggttgccgattagggtagtatcggagtttcagcctatcttatttgatttaactatattcgctctatatgcttcaatgacatgttaaatccgccctttatgtcaaagatcttattatatttaagtatattaagcttttatttgatatattatacttgttttaatatcctgatatagagtagtatcggagtattagccgatacatgctagatctatatgatcggctatgctataaacatatatagtcctgttattaatatatatttcgatccaggtgatttatactgtctcggcatggcgaccgatctatcccaatcacttgatttaaatatatatcgatataagaactatatattggtaatatctacagccaatcgagtaggtttagttctttattatctatttatagtcgccgaacgattcacatatgacatcggctcaaagataaatgatatgtcatcggcacttagccgatcggctattatttatagaattaaccgcgatttctttatttctatttcttgttgattgcaggatcaaatcaactggcacgctaacacacccaaaggcaagctttggacctgcactggagttaagcaaatctcccaggcctcgtgttttacgtcaacagtggtttgggaaatgtgtttacgaagaacaagtaagctaccgtatctaagggtgtgttcggtagtatgggatgtgaagtaatccctcccgcacgaaaaacggagtggcccattaacacgtgattaattaagtattagctaatttattttttaaaaatggatcagtatgaatttttttaaacagctttcatatagattttttttaaaaaaatacaccgtttaacagtttgaaaaacgtgcgcgtgaaaaaagtggtgagtgggttcccaactcgttttggctaacacagcctaattaagtaccgtttagaatacaacttaagtaagtgacacgcgtacattttagtagcttccattttttatatagagtaaagtccatcaccggtccctaaacttgtaccgatgtgtcatcccggtccctaaactcgcaaatcaaccgttcaggtccttaaacttgttcgactgtgtcatcccggtccctaaactcgcagatcactcgtttaggtcctccaagttgttcagttgtgtcaccccggtccctaaacaggacagtctaaaaactttatatcaaaaaataattcataactttttcatgtgaactctaatgaagacaaactttatatcaaaattgtagccctcgacgcgacctacaactttgtagttgaaaagtttttgaattaaaactgtttagggtcccaaaatattgttgcatgtttatagattttgcaattttgattttaaaattacattttgggacaaaaaatgacttaaaataaaaaaaattcaactacaaagttgtagatcgtgttgagggctacaagtttgatataaagtttatcttcattagagttcacatgaaaaagttatgaattatttttaaatataaagtctttagaccgtcctatttgacccagatgatattcaaatccaaatttagggaccgaggtggcacaactgaacaagttggaggacctaaacgagtgatctataagtttagggatcgggatgacatagtcgaataagtttgaggacatgaacggtcgatttacgagtttagggaccaggatgacacagcggtacaagtttagggaccggtgatggactttactcttttatatatattgccccccaacactactgcacgcacagaccggagtcctaagggaatgacagtccaaccgaaaaccaccttatcccattggacggctcaggccaaaccgccatagcatatggatccggatcgtttacagtctgttcgtgtgaagggcagtgaattaatgccatgaacagtgatgctttactataactatagggtcgaaaatactgtagcgcatgacttgatccttccgttctcgatcggacggtttacagtatccctaatacgcagtactactcatcctctgcgttagtacccctctaatgcagaagatatatgaattccatagcatggcccaggtgcctgtgcaggttcattgctgcgtggaaagattggtaagattaaacacgaacaacttaaattaaaaacagtccatctgaatggagcggtaactctttgaaagaaagaaatgattcttattcatcaatcattatatatatatacaggcaaaacaaagcaaccagtagcatcatatagttcttcaaaacctgatcacatcacatgtctatgtgagacgatcagaagaagaagaagacacgaagttctaacaagcaaagcttgatgtgcagtagcacatggacatgtataaacgtcatttccatatcatatcagttcgctgggaggcgggggcgacgccttgggcggattaaagccgcagccaaaggcgcaactgcatgtgttctcgtcgaggcaggtgcctatcccgtccgagtacgagcgaatgcattccgagaagcaccgttggcacggcactttcagtatcttccgcccaatgcactcgtccgtattcacgccacctgcacaaatggaggatcaagcggctctcgctcagggctctgcccaacaatttccaataacttttttttttgcgatgaacaattctgagaaaaaaaaactatatacagagaaaaacatacacacgtgtgtgtatacttggtgtagagatgatcaaattaaagcgtcttaaaaaatagtactacctccgtttttaaaagggactttactttgttagatgaatatggataaatattcggggaataaattcttttttagacgcaggtaacatatatgtacgagactacctgaatctgaaggtgttgcttccgccgcaagaacgacagcaagagcaaagagcagtgctagtagttggctagtcttcatctccagcaaacgttggccgagcgttggatcagtagttgctatcctgaattttgcttgtgtctgatggtgctctacctccggtagtactatatacagtgtgtgtaatggaggtgttttatactgatgttgtgtttaccatatcggaatgttattatttttcatgggataagatataccatcaatactttgattctaataaagatctaaaacatatgtttatgccaaaataaggcatgctattttacaccttatttatttttggacataaggcgtgtgctacctcttaatttatgattaggatatcactttgtgatacttcacggaaatcttacctcgtcatatttccacttcatctaaccttacatcgaaattcatattgagttaacggatatcgtcaaaacaagacaatggtactgctgaaaccgaactttaacttgagtcttggaccttgtaatagttaagcctcatctcaagtgtgaacctttctccacccccacgaccagagctcgtccctagctctattttcctctaaaattattgggctttatttaccaagtgtcatttatcttgtctcagatactcaatcatttagtccgcgattataaatttagaggctccaataattggtgtgttgatttgcagggtcaattaagtctatcacttcgatcacaactattttaagaagcatgtggtgattagttagctggtgataatacaaaaagatgagcttcccaacttttaccttctagtttattttctgaattttataatacatactctcataatctgaataaaatcttggactgttgagagaattagagattctgaaagaagccacacctattataagacaaccccaaatagggcccatatactagtatatctgccatcaagatcaaggatattccaatggaggaagaatggtgatgtggtatgcatctttaaatccatagaagatggtcaattgttatatatgtttcttacactcaataacttatcatgctcaaggattttataaagagaaattttatggttcttgaaaaagtacttcgaggcatctaaattttacactaaattttatgtgcctcgaggtatcaaattttatactagaaaatatggcaactccggtacttttttaaggataaaaaaattacccttttataaaactaaggtccgcacatcaagtatgttccttaggttacttttgaatttacataccgtcatttttactttttctgtaatatcttagaagtttacgaattttaaaattttaataagtttttttttgtttctcaagtattgcctgtgtaacatcatttaatttgatgaatttaaggtaatctagttaatcttttttttttcgcgtcaatcgcttttcatggtctgtctgatcctttttctttttctttgaaaactcagtccgatccattcatcttcggtgttagtgctgaagaaaatgacaatcctaccactaccaagtttaattgcaggacatggtggtttgtccacgaaaccacacgatcgattgtttctttcatgtgcgagtccagatcataactttaaacctttcatgctacttcagagttcaaaaccctctttcaaataaacttcagagttcatcagaatcctctctcagtgacaaaaaaaaatcagagttcagaagcagtaagaacagaaaatgaaaacttcagcgttcgatctcccattcctggctggattcatgcggctacggcttgcagcagtaggagcacttgcacccttgctgagggaagcactggccttcgcctacgcccttgtacgccgcggcgcagtccgcgtatcacttggacggctcgcacgcgcccctgtagatgaacgcggtgcaggtgtactccggcgtgcacttggccagctggccgcgaatcctacacaaacattgcagatcacaaggtcattgcgcagaagaaattactactactacacttcattgttgagttgtgatccaaatttatttgcacttaataaaggccagctacgacagaagctggcctttattaagtgcaaatgaatttggatcacaactcaacaaactccaccttgagacaaattccttcttgtagcatgaatcaatccttcaccctgaacacaacaaagacaaaaaaaacactttcggcgccaaatagcctctcgggctaaaccactataccaactaagcttgagcaaaactcaaacttagcaacaggaacaggctttgtcattatatcagcaggattatcatgagtacttatcttgcatacctttagcttaccttgcacgactacatcgcgaacataatggtacttgatatcaatgtgctttgtcctctcatgaaacatctgatctttggtgaggcatatagcactttgactgtcacaaaacaagttaatgcaagaatcaactccacaaagctcagcaaacaatcccttcagccaactgattctttacatgcttcagcaatagccatgtattctgcttcagtggtagactgggcaacaacaggctgcaatgttgccttccaactcacagcacaactaccaatggtaaacacataacctgtgagtgaccttctcttatccaaatctacagcaaaatcagaatccacatatccaacaagccccttatcagtcctgccaaacttcaagcaagcatcagctgtgcctctgaggtacctgaaaatccactgaacagctttccagtgttctttaccaggattagccatgtatctactaaccaaactcatagcatgagataaatctggccgggagcaaaccatggcatacatcaaagaaccaacagcactagaatatggaactctagacatgtattctacatcctcatcagtactagcacattgtaaagctgataatttaaaatgaggtgtaataggagtgctaacaggctttgcatcatgcatgttaaaacgctgaagaaccttcttaatgtagctttgctgactaagaaataacaaaccagaatttctgtctctagtgatttccatacctagaattttcttagcagcaccaagatccttcatatcaaactcactactcaactgtttcttcaatgtagtgatttgttccttgctcttggcagcaatcagcatatcatcaatatataacagcaagtatataggtgatccattaacaaatttaatatacacacagctgtcaaattcagacctcttaaagccatgtgacaacataaatgaatcaaaccttttataccattgacgaggagactgtttcaaaccatacaaagatcttttcaacttgcaaacataatcctccttaccaggtactatgaacccttctggctggtccatgtatatctcctcctcaagctctccatgtaaaaatgttgtcttcacatctaactgctcaagctcaagatcatacatagcaacaatactgaagaatgtgcgaattgaactatgctttacaactggagagaacacatcattataatcaacaccagcaatttgactgaaacattttgctactaaccttgccttaaacctcggaggctcgctaggagataaaccctcctttctcttgaagatccatttacaacgaacaggcttcttctgttttggcaagtgcacaagctcccatgtgccattcttctcaagagactgcatctcctcctgcatagctgagatccacttctcacggtctccagaaacaacagcttcagtgtatgtggctggctcaagagtattctccacttgttcagcacaactaaaagcataataaaccatatcacattcctcaataaaacggactggagctccacaactcctctttgttctgcgatgggcaataggttcatcttgtggctgcaaaacaggaggtgagtgctgaacagtattattaacatcattaccaacaatttcagtttcatgatcatccacgtgctccacctgcacgctaacatattgctgctcctcatctgaaccacctggtatgacatctgtgggcaagctatcattaaacataacagattcattgaaaacaacactcctgctcatgaaggtcttgttagtttcaggattccataacttatatccttttactcctgaaccataaccaagaaatagacacttaatagctctaggctctaattttccattatcaacatgagcataagcagtgcatccaaaaacgcaggcataccagaccatacctcaatgggagttttcttattaagtgggatagaaggcgacctgttgatcaagtagcaggcagtgttagcagcctctgcccaaaaacgcttgttcatgcgagcgttggacagcatgcaacgagacttggagatgatggttctgttcatgcgctcagctacaccattctgctgtggagtgtacgggatgatgtgatgcctaacgatgccttccttcctgcagtaatcatcaaaagcatccgaacaaaattcaccaccattgtcagtgcgaagtacttttacctccctttcagtttgcctttctatcataactttccactccttaaaagcagcaaatgtatcatctttatgtttcaggaaataaggccacacttttctagagtaatcatcaataatggtaagcatataacgagcaccaccaagagagggcttacgagaaggcccccacaaatcagcatgtacataatcaagtatacctttggtgcgatgaactgaggtattgaattttaccctcttatgcttaccaaaaacacagtgctcacagaacttcatgttaccctgagtgcagccatccagcaagttcctcttcatcaattctgccataccaagttcactcatatgtccaagacgcatgtgccacaggttagtcttactaggttcatctttagtaacagcagcagcggtaacagaaccatgtaatgtacttcctctaaggacatataagtttgcagaattcatatcaccaatcatgtaaacaagagaacctttcgatacctttacaactccacctgaaccagagtatttgtatccttctgcatcaagtgtgctgagagagatgagatttctcgctatccctggtatgtgtctcacatcttttagcgtgcgtgtcatgccatcatgagtcttgatctgaacggagccaatgcccacgatctcacgtgggttatcacgtggattgcccgtggttttttctctcctgttttgggagggttttccacgttaaatctcgtgtcttttgtgattgatctattgttttttatcgtttgttcgcctatcgtttcctaacattcattgcaaaatgcaaactgcagcgagatagagaggagtgttcctatgttacattgttacctgaggatgacattgacaccagaaggacagaggcgaggagcagcgctaatacgtggctgttcttcatctctgattttaccgagaatgatgaatcaagaaaaagaggaatgtttcattttacataatgtttttttttaccggaatttttttttgacgattttacataatgttggttttcttttatagcgtgtgtgctgtgcttattgatttttggaatgggtttaactcgtgtgatttttcattcatggaatttaatcgcctttatttctaggattgacaccgaataacttgcaattagacagcgatattttcttcatgcgcatgcaggcagcaagccagttgtggtcttgtggaatacaccaaacgtactttcctgtctcaaattatagctctttttttggagcctcttcggatcgagggatttttataggattttcaaagaaatactgtaggtaggaaatattttgtttcctgttgttcggttcacacgaattgacccaaagaaaaatcggaggaaaaaattcctttcctgtggaatcaatagagaaacaaaagaaaatttgcattcactcctaccttatttttttattttcctatgtttttccaatgtctatccgaacacataacacatgtttaccaatcatatctataaaattcccgtgtttttcaatcatctattttacacatacattcctatcatattactatgatttccctattcctatatttttacaatcctgtgatccgagtaagcccttagaatttaaatttgtcccaaataactactccctccatcatacagtatagtaagctgaaattagttggaacaccacctagtacaacatatacatgtcctagatttccaatatgttaattttgacacaattttccggtttccatcctaccctttgtgattcacaaaaatgaggggcatttcagaccttgtcctaatgcacattgcacaacactactgtaaagttttgcaacacattgtataaccaacagacaaagagtttattcaaacagggacaacttcatcacaccaatacatggatattacacatcacaattaagcccagacttatgggctgcaaaagcacagcactatgaagcgtctctgaagtcctaaacaagccatgaaacttaagccaaggatgaattgcctaaggagggaccagaccacaccatatatgatgatgatttgcaagctgctcttcatctcatctcatagcaggaaccctctgctgtgacccgttatgcatgctgccgacgccaccttgtgcgcttgcctggccaaaatggccggagaagctactgagatggtggccatggcggtcgaagaaggcgtcgtctttctgtgccgcagaagttacagtgaaggtggaagcagaagctgcagctctcttgatgttagcttgtgaatccattgctttgaacggaaatggagtttgatctccgattgcgccaccacctagccgtagatggactgaacctgaagaattttggctgtctgtggtggtcttggtggaggtagtgtgagactgttgctgcagctggagctgcttggtattcaggaatcgcccaccagtgcccctagccctcttcattgcatggcgatgccgagattcgtgaaggtaaggctgcacatggagattgtttacaatattaagccaagcagagtggttaacaatattaaaaggttaatgcaagatgcacaaggagatggcaatggaaggtaaaaacatcaatggatcagttggcagtggcaagaacctttcgggttttgacgagcttattctgggcctctaacttagcacgcagttgtcttctgcgaagaattccatgatattgtttgggattgacatatatgggcccatcatctgctatctccagggagggcaagggaactcttggcgatgtgcctcctcccacaatttgaggatggaactgttttaagtacaactgattaggcaagacccatgaaaatatagataaaaataagctggatgccccaagagatgtgtgtgcacatggtttgcataactactacatgttctccctgaataatattgatctagtgaataaactcacgtatatctagtactagttcttaagaattatgaactgcatgtgactgcattactcaaatagacattagttatgtcttctcactagtttaatttaatgcatcaacctacaccatttacaggtgaggttggcaaaacctaaaataatgctcaaaggtaatctttttgtgctatataaagagcttcagacatactaccctgttgaggttacgttgatgactcaatccatttttatgcaaaaccaggcagtttctttacgacaaatgggaaaagtgacatattttaagcctctagactaaatcaaatcaggctggactgatcatagataaataatgggatctcctaagcaggacctggatgcatgaattatacccttataattacatatgttgataaaaaaaatgttactactagtttgttagcttcctctgcaaaagtttgaagaccttgagagaattgagagagaacttgttagaagaacataccaccgagcgtgaactgtaggatgcccaaactcctgaaccagaatcgttgtatgggtatgaaatgcaagcctgtgaaatatacagaaaataatcagatgcacggttacttataaagaataggatgagctgactttgccagatctaatgttggctccattagcatatcttaccattggctggccgtaatcaatgttttgacttggcactacagaatgattattatcaaaagtcaacgttgacctcataggaccatcaacagttctcctgaaggagtcacctggtgacagcaggaaaatgtagtgtaggttgataaattacaaaaggaatcatgaggaaacacaggaagtatcctggcattatccaaaccagataaacaacaaaagagaataacatcctcagaaagtttagattcagtacttgtgtagaatttagcagcctcgtcgtttcgcttatacttattataagtgaaacggtttattagtgattaaaaaataatttatgggtaaaacttttatatatgtgttcttagtgatataaaggcaaatgctgtaaaataaactagtatgatgaaaatataccaaaatcaactcgaaaattaagttttcaattcaaattattgcttatgcttataagcaggtatcactcatgcgtagcaagcaatgttttaaatttacctccacaaatttatgtcaatatcttgtcccttctacctagtttttcaggaatacatatttagttgcttcttgaagatactactatctgtttagtgaatcagccaggacaggacatgaatcttgcgtttatcaacaagcttcttatttactacgtttaggcaaacaaaacaaaataaaattttctactttctgaaatggcccgactgctaggtactacaagtgttgatgttgtccaatttaagaagcacacatggatacatatttgtgcatgtttcagtgtggaaatttgcacatgtgcttcaccagggcttgaatgtggtacattctgagtttagtgagtgctttggactctcaaaaaggtcaagaaaattctactccctccatcccaaaatatagcaacctaggactagtcgctaaattttgggacggagagaatagttaaaatgatcggtttcaaaaaaagaatagttaaaatgaatggtctaacacaaaaatgtttgagggcagcattgtttctttgtaactagaggttgtacttatgctaacattgaagaagatgcttgccaaagaaataatattcctccaatctttctaattgatgtcttaattgaaactaataaactcatctaatatgctagataataaatgcacgtgccacaaaatgaactgtttgttcaatgtgccaactgccaagttcataatgtctatcttggtgttttcctcgagtaagcctcagatatgacccaagtttagctaattggcagagctaaaacacacaagatttcattgatctgtcattttaattcttaaaagtcggaaaaatacagttcctttgtcccatatttagctatgttttgtagacaaagatcaacaaaccaaaaacttccttcagaaaaaaaaaagcaagactgtcatgtactgtatatgaatagcactgggaaaatacaaccgaagcaaaatataccaaataaatccatacaacacaacctaaagatacaacaaatataaagagtattaaccagcaggaaattatctataggaacacacagaataggtggactgaatttctatagtccgagtatatcatcacttcatcagtcatcaacacatcactcgtcctcaaatatggtcgagagaaaggcagcactagaaatgttcccacatcaagtgataaacacaagcttatatgatgatgatatatgatctaaattcccaagaacatgcatgacaacaactgctgccatcgagtctgacactgagacttgagagatcctccctagagccccaaagacatccaatagtagccttacaagccacacacgactagtcaacaatctccatactcaatcaatctttgtgccaaaacgacatgcatccagtcaaatccacaaacactaagcgtaataagcctcggcatcaagaatatgctccattacaatcctataaaagaatcgttctttgactacgaaaagtcaagcatgacaaactacccaggagattggagatcaagaacacgcactcaaacaaacatatgctccaagaaaccaagattacccagtggtctcagcacttgcacaagatcagcaaacaaacatatgctccaagaaaccaagattacccagtggtctcagcacttgcacaagatcaggggtatagctactgctacatcgtctaggaagggagaagagaaaggtttggattatgacctttggaggcgtaggaataagaagacgatgaggggagaagcatggctaccacgcgcctcctccctcggtgcctccgccgagcgaagaagctgctgctgctcgctgcgcctgcagcctcctcggctcctccccgccgtcgcttccgctgctgcccccctcgactgcatcattccaactgggggatgttctttaatcctcctccttgttccaagcgacgcctacaaaaccattctttattgcaattttgtatgcctacatctggagcaccgattatataactgcaaggtggggaccatataggagagaaaactgagaaaaaggagaaatataatttggttttaccaatagcaaatttcccataggttaatcttgtatgagctgatttttttggttggttttaattaaggagggggaccaattcgtacatagaatctcgatctatcgatcaaatacatattgctgttctagaggtgctgtcgataaagagctagcattatcatgaccgagggtggtttggtgttgtgctgtaacaaatgattgttttgttccgaagaaagtatcagacaaacgaataatggcgcaacttgatatgcatgactgtaggagtgactataaaaaatatctttttatagttaagtttacttttctcctaaactatagtatttataatacactttactgacataacatgtgaacatggttatgacaacaaatgataacagcactagaaaaaaagaaaaaccttccgttcactatcatctcgacaaatctacaagataatatatagttgatggaaacttaaaacgtcatatcttatctcacgcctacttatcatactcctatggatatcattatcgttgtcattccagcccttaaaaaaccagcctgacctttcccagaataaaaccaaaacaataagacgcagattggtccatgtacccatagcaaaaacttatggttgccatgtcacctcagggtaattaacaatggaggaaacacggtttttggccaaaatcttccagttggcagcgtcagggtatggcccaccctgaggtcacatgctcaccgttggttcggtgtgtgtggggagcaacggcatccaatgcggctggtaagtgtaggttggttgggtgcacgtccggggttgctatctatggcaggagtagtagcaaaattagttaaagaaagtgaaagaaattattctctggacacgcactgaggctcccacaggcttggcaacttctcttcctaagtttaaggtatagttgactgatttaaggtatagttttatgtctatcattgcatggtggctgactgtgatgaaaacaggactaaagtttaggtaggctgctgccattatcaaaacacaggaaatgttaattctcctagaaagaattttaaaaactattttgaaaaggttcggttcctacaaaaatcagaaaatgttccctgtatttaaatgggggtttgaatagttgcatatactactagtattatgcatgatgggttgaacataacaattgagtacatgtacgactgccactgcaaaatacaatcggaccccaaccaagttaccagcataagagaacagaaactacttaaaaattgtacgtaaaatcatgaacacctgctttccgactccacaagtctcaattcctggaaataaagcagccagcatttcgattgttccgtactgcatgcatttttcaggttcttcaacttgcattcctgcgaccacaaactaggaagggtcaaacgtaggcacaagtactcacaccattatagttgtagatcaccccataacaagaatcttgtacattccaaatcaccaatagcctactactagtgtgcccaagatttaagcatcttttgaagcgtcaggctcactgcatgcttacagcaagaggagagttaaccaagaagccataggaagttagaaaccagagaagagtctttacatgatcattcttcgctgcccattgggcacaacttgatccctctcctcgtaatggaaaagagagaccaaatggttcaatataaaacgccaaattgggcgattcctggaccaacacggaaggcaagaaaagggaaactgcatgctggagtatcatactatccacttccagggttccatgcgtgctgggcttccccaaagtagaattattctccccagcactagttgctatttctactaaaggttttcgttgctttgttagactgttaggtctcatgatacagcttaattatgtctacctaagctcccttgatctaagagatgtttgcaaagtacatcagtgattcagtagctcagcagatataatagtagtgctagtacaggtttgtctcacaaaagaacagaacaagcccaacaaatggagtggtattagtacagactctacagaaaagcaagaaccgtagaaatgtcaaacaatagggggatactaagcagcaacgaataaagtaacacccatcaggcaacaaagcttaactaggtatggtagtactattgaagtgtcaagattcttctcagcagagaatctgagtttacaactttgcacctgtagcgtccgtcccgtcgtggcgcctagtgggaaaactatctcttaaaaatcctaaatgcgaaaattgtttctttgtttgttgtccagtgtccgtgccattccagatctcaaatccccaatccatcgtcgaatccaaaccctaacctcaatctgtcccgaatcaaatcttctcgaaaaagtctattttgcctccctcgagttcgtgggccgatctcttctccccggccatttcctctcagcccatctctcctctcccctccatccttgcccgcacgtgcgaggcacgtgcgccgctcgagccctgagcaagagagagctcgctctctctctttctttcccccctctctctgctctcgctccctctcgatgccgctcccgccgacgccgctcaaatcgccgtgccacccgttgcttcccgcgcgcgcgccgtggtggccgaccggctagtcgccgccgccatcagcacctaccgcgcctgagcccgcgcctgccgcgccatcgtcgctccgccctgcttgcacctccgccgtttgtcgccaaagcaccgggagagccggtgtgtgcgaaggacgcgtgaaggggactccgggcgctcgtcttcttcctcttccccggcccgaggccggagagatcactctcgtgccgtcggcctctcgtcacagcgcccgtctcgtctcggtagaacaccttcccgttctccctcctcgctcttcctcctcccctcagactcgagcagtagcttgtgtagtctccccgtagctagcctgcgccgccctgaccgttgccgccgctcgcagtaggctcgccgccgtcaccgccgcgctcggtagtagccgcccgtcgccggacttcctcggcgatgttccgtccaatccgaatcgatctcccgtcacgccgtcgccgatatccccctttctcgccaccggttgccgccgccacaatccgccgccgtcgaaccccctcaggtgaatccgagccgttggctcgctccctctcttttccccttgtcattccggtgtacaccccgtcgccctcgtcgtcgcacggtgtcccggagaaaccgccgccgcccgccgtccattagcagccagcgcctttgtcttcctcccgccagcccgcgtggcagccacgaaggcgccacgtcagagctagctcggccggaccgggtcaagctgaccccggtcagccaatccttccgtccctgctcgcgtgcgcgcggcccacggagagccaagaggctgcgcgtgggccacccgcgcgccgcgtccaccgcgagccacacgcgtgcaccgcacccaccccccaaccctagtgtcgcgccgcatgcacctcgctcttggtgagccgagccgccgacaagcgggtcccactcgggaccacgcgaggtgagcccggaccaccggctctctctcccctttcctcccgcgcgccctaatgggccatgctctctcgggccggccggcccatttagcgcggccgagttgcccatttctctcaagccgcgccctagccgcccgaggaaagttcaatctccctccctccctcttttcttttccaaaaaggggtttaattaaatccttttttctttagaccaaaaatccaataatcttagaaattcaatatcttctcaaccgtacatccgtttgactccgttcaacttccaaaaatcctcaaatctcgagatctatctaatggcacgcttagaggtcaataatagggctttaattccgccgtttgttgagtcgtctcgttcgcgtgtagcttcgaagcccgaagacccggagtgcgcggatttcgaggatcaagctcaagatctcgagcaaggcaagtcacctttgatcatcttgcacctataatttaaatctaagtatttcttttccgcaaataatgcatggataggattaacacaagaaatttggccgcggcttgcgagatagcctaccggccctaatcctaattgctgcaattaccctccttgaataattgaacacttaaacctcatttgtcgactgctgtacttcgatgtacgggcctttggacacgcatgtcgaagtcctcccctcaaatttaaaatatccaacgatcggtaaaacttgggttttacaaaagacttggaaaaacccgacacctggtgacggagcgtggggctcctcaccgggagaccgcgcaggcccccctttgccggttcggccggggactcagggagagattctaagctctctgtatgtggaaggctcgcgagacaggaaacacacaagacacgggcgatgtatacaggttcgggccgctgagaagcgtaataccctactcctgtgttttgggagatctgtgtatgaaggagctacaaagtatcagccagcctctcccttgttctgggtttctaatctggaaaagtccagtctactccctcatctcagtgggcaaggtcctccttttatatcttaaggggataccacatgcaccatttctctcttttttgtggggacttaccccaccttttcataaacagacggagacttgtatggttgccgtccgaatgaccttttgatgggacggcccatacctacctccacttctgccggaagcaggcgcgacgtggaatcgtggttgtctgctgacgacatgaccggtatcagaccagtcacgtcggtcattcttgtccaccacgtgtcagcttagcaacctacatgcttgcccttcttcacacaacatcttgcctgtaatggttaggatgaagcctggcatatatctgaccaggactaacgtgccatctctgggaggtaacacgctagctccagctggggacgagcgcctagaagccctcgtcctgacgggatggggcgaggcgtgcgtcagatcgcctgtcgccacctaacccgcgatctgaccggtctgtgactggtcacagaccggataaacgagtgcactgcactgcgttacatacggcgtgacacgctcagcccaaccgcaataaatgtggttaggtgagccccactgtgctcacctaacccatacacgcggagcaaaaacccacgaggggtcggggcgcctcggccctcggggccgaggggggtgcggcccgaccccctcggggggactaagaggagggcgaacgcatcacccttgggcccgacgtccctcgggggtaccaggccacgtgtgcgattgtgtctgcctcaaacctctagtcatgatactcctgatcccatgtcaccgacagtagcccccggcgttatgccagggcaatcgccctctttaagggaaacggtcgggcgtgacgccactcctaagacctggtgacaggtgggaccggtctccacaattgggcagaaacccaacggtcacaaaccacgcacatcggcaatggtaactcggctgtcaacaatgagcggtgtcttcaagactgccacattacttgagtagcacacgaatctggacatggcgattcgtttcgtctggagatatggtaacgtcgcttcggtcggcgagcgtaattaacgcgcgcacgatatgatctatctcgactgccacaaccgcatatccacctcatgcgccgcaagcgggcgaatgtgattagtggaagcgtgggcgcgagaaacgagggggcgaaatagtgggcgcgagaagcgaggagccgggcacagcgttggcaagagtataaaggcactgaggaagggatctgtttccttcctttcgccattattccccttgtcttcaccgcttgcgccctaactccttctttcctgtgccctaccttcgccacacgcgctcgctcttaatcttctcttcctccggcgccatggcacggggttccgctctgctcgatggtagcgtgctgccgccttcccggatcgtgagcgagaggcaggctgggctgccgcgccgcttcatgccggaatctgccaccggccgggagatagtcacgctgggcgagggacgcccggcgccagactacccggggcggtccgtcttctttctcccctttgcaatggcagggctggttccaccattttcttctttcttcatggatgttctggagttctacgatctccagatggcgcacctcacccccaacgcggtgatgacattggccatcttcgcgcatttgtgcgagatgttcattggggtgcgcccatctcttcggctgttccggtggttcttcaccgtgcagtcggtgtcgccgccatcggtagtcggtggctgctacttccagccacgggggccggtgctgaaccgctacatcccctgcaccctccgcaagaagtgggacgactggaagagcgactggttctacactcccctcgccgacgaggcgcgcctccgacttccgagccagcccccggcgcaggcctccagctggcgggcgccggtagatctgggggatggctatgacgccgtcctcgaccgcctggcgggcctgcgatcccaggggctcacaggggccatggtgtacggcgactacctccgtcgtcggattgcgccgctccagcgacgcgctcggggcgcctgggagtacaccgggtccgaagacttcacgaggacccaccagggagtgagatgggactgggctcctgaggacttcaagatattggtccaacgggtgctgaatctcaactccgtagaggcggccctcattccccaaggaatcctccccctctgcagcgatccagaccgcgcctccatcctgaccattatgatggcggtcggggcctcagaggagcgagctccaaagggtcacgacggcgtaggcgggagccgcaggggggaacaatctaccccgagagggggtcgtgcttctgggtcccgcgacaggggcccggggagcagccgccctgccgacgcccgggggaagaggaagcagggaggaacacctcccccatctcctccccgagggggcagggcggcgcgtgccagcagcaggcgcccggagggggccgcgccaacatcgcagcccgagggggagcgcaagaagaagcggccccgcaagatgggggagacagaaccatctcggggaaacctcatttcccctccaaagtggtcgtttaaccgaccccctcgcaggttcgtctctcacccatcgtggctgtattcattctctcgacacgagttttcactcacccatcttgttcgtcttctggttttttcttttgtttcagcgagatcccgtcgcatccctcccgccattccaagtccggccagtctaaggccgaggatccggcggccgcagaggccctcaggcgggaatctgaccggcgagaggccgcggatcgcctacgggaagccgaggaggccgcccaggaggccgcccgggctcgccaggccgaggaaactgctcgggaggaggccgcccgggcccgccaggccggggaagccgctcgggaggaagtcggatttcgccaggacgaggcgatggcgacttccgaggcagctcgcgacgaggccgcgggcgcgtcgcttgggcccactccctcgggcgacgctcaggaccaaccgggtccgggggacatccccgagtccggcacttccattggcggcccgagccgcgtggcatcctctccaaggcggctcttccccacgccttctatcgccccactgaacgcagagccccttctgcaggccttggccgccgcaaacaccacggtgttggatgggttaagtgcccaggtggaggtcctgcaggcagagcgggcggagctcgacgccgcgtgggcgcgtgtcgaagaggggcgacgctcggtggaggccatggtggaggtgggccgtaaggctcaccgccggcacgtctcggagcttgaaacccgtaagaaggtgctggcggagatcgccaaggaagtggaggaggagcggggggctgccctcattgccaccaccgtgatgaacgaggcgcaggacaccctccgccttcaatacgggagctgggaggcggagctaaggaagaagctcgacgccgcccagggggtgcttgacgctgccgctgcccgagaacagcgggcggcggagaccgaagcggcgtcccggcagcgtgaagaggcccttgaggcgcgcgccatggcgctggaagagcgcgcctgcgtcgtggagagggatctggcggaccgcgaggccgctgtcaccatccgggaagcaacgctggcggcgcacgaggctgcctgcgccgaagaagagttcacgctccgcctccgcgaggacgtgctcaccgagcgggagcgagctctcgagggggccgaggccgcggcgcaacagctggcagtcagcctgtccctccgcgaggcagcgcaggaggagcaggcgcgccgcaatctggaaggtgcccgcgccgagagggccgtactgaaccaacgggccgctgagctcgaggcgcgggcgaaggagctggacgcgagggcgcgcagcggcggggcggccacgggcgaaagcgacttagccgcccgcctcacagctgccgaacgcaccatcgccgatctgcagggcgcgctggactcgtccgccggggaggtcgaagccctccgcttggcaggcgaggtagggcccggcatgctttgggacgccgtctcccgcctagattgcgccggtcggcaagtgggcctctggagagggcggaccgtaaagtacgccgccaaccagggaggcctcgtccagcgcctctcgaagatggccggggctctccaacggctccccgaggagctcgagaagacaattaagtcatcctcgagggacctcgcccaaggagcggtggagctcgtcctggcgagttaccaggccagggaccccaatttctccccatggatggcgctggatgagttccctcctgggaccgaggaccgcgcgcgcgcgcaggtccgggatgccgccgaccatatcgtcgacagcttcgatggcttggcccctcggcttgcgttcgcccccaactccgacgaggagggcaatgccggtggtgcagacgacagtgacgtcgaggccggcgatccgggcgcatcggattgagcccccagacccccgccattcttcagttttttcttcttttctttcttctaaggccttcgggcctcttttttgtatagatcaacttaatctgtaatcaaaaatgaagaaatttttgtgttaatttcatcttgctgtgagtatgagatgaggatgatctgtgccgtggtccttttgtgtcttagcttgaataagggctcgtgcccaagttctagtcctcaaaaggcgcgggtcggggctagtgcctgaggagatccacatgtcgagactggccaggccgggaacgtggtgaccgagggttatgggtgacccgattgtgggtttttgccgattccccccccccccccccggagttcaccacgcctcggggcacggctcggttctgggccccgttcggcgattttagccgacccgagcccccgagggcaggattgagcacgagtgacctatttcaagtcaagattcttcaaaaggaaaaaacagcacagatacagcctttaggaaattgaaactgcttttattgaaatacagatgtaagagaaaaaagaatatgcatatgttgtagcccccggccaaccctgcacgcccgaggggggtgcggggttggcccgagcccgaaacctgacacccgaccccccccctcaggggtagaagcgacgaaggtgttcgatgttccacgggttaggcagctcagtgccatcgcccgtggccagccgtatggagcccggccgggggacgccgaccactcgatacggaccctcccacattggtgaaagcttgctcaatccagcacgcgtttggacgcggcgtaggacgaggtcgtcgacgcagagtgatcgggcccggacgtggcgctgatggtagcgccgcaggctctgctggtagcgcgcggctcggagggccgcgcgccgccttcgctcttccaagtagtcgaggtcatctctgcgaagctgattttgatcagcctcgcaatacatggtagcccgaggagacctcagggtgagctcggatgggagaaccgcttccgcgccgtagacgaggaagaaaggcgtttccccggttgctcggcttggtgtagttcggtttgcccagagcaccgctggcaactcctcgatccatgaatcgccgtgcttcttgagtatgttgaaggtcttggttttaaggcctttgaggatttccgcattggcgcgctccacttggccattgcttttggggtgggcaggtgaggcgaagcagagcttgatgcccatgtcttcgcagtagtcgccgaagagttcactagtgaattgggtgccattatccgtaataatacggttaggcactccaaaccgggccgtgatgcccttaataaatttaagtgcggagtgcttatcgatcttgacgaccggataagcctcgggccacttagtgaacctgtcgatcgcgacatacagatactcaaacccgcccggggcccgcctaaacggtcccaggatatcgagtccccatacagcaaatggccacgaaagtggtatggtctgcagggcctgggccggctgatggatttgcttggcgtggaattgacacgctctacatcgccggaccaggtcgaccgcgtcattaagagctgtcggccaatagaaaccctggcgaaaagctttaccaaccaaggtgcgcgaggcggagtgggctccgcattcgccttcatggatatcggcaagaagcacaacaccttgttcccgaggaatgcacttcaggaggattccattagccacgcgccgatagagggtcccttctaccagcacgtagcgtttggagatgcgatggacgcgttcactcccttcgcggtcctcgggtagagtcttatctgtgagatatgcttggatctcggcgatccaagcaatcaatctaagggagttgggagcactcccctcgggtcccgaggcctggacccctacctggcgcgccagatgacggagcgtggggctcctcaccgggagaccgcgcaggcccccctttgccggttcggccggggactcatggagagattctaagctctctgtatgtggaaggctcgcgagacaggaaacacacaagacacgggcgatgtatacaggttcgggccgctgagaagcgtaataccctactcctgtgttttgggagatctgtgtatgaaggagctacaaagtatcagccagcctctcccttgttctgggtttctaatctggaaaagtccagtctactccctcatctcagtgggcaaggtcctccttttatatcttaaggagataccacatgcaccatttctctcttttttgtggggacttaccccaccttttcataaacagacggagacttgtatggttgccgtccgaatgaccttctgatgggacggcccatacctacctccacttccgccggaagcaggcgcgacgtggaatcgtggctgtctgctgacgacatgaccggtatcagaccagtcacgtcggtcattcttgtccaccacgtgtcagcttagcaacctacatgctcgtccttcttcacacaacatcttgcctgtaatggttaggatgaagcctggcatatatctgaccaggactaacgtgccatctctgggaggtaacacgctagctccagctggggacgagcgcctagaagccctcgtcctgacgggatggggcgaggtgtgcgtcagatcgcctgtcgccacctaacccgcgatctgaccggtctgtgactggtcatagaccggataaacgagtgcactgcactgcgttacatacggcgtgacacgctcagcccaaccgcaataaatgtggttaggtgagccccactgtgctcacctaacccatacacgcggagcaaaaacccacgaggggtcggggcgcctcggccctcggggcggaggggggtgcggcccgaccccctcggggggactaagaggagggcgaacgcatcaccctcgggcccgacgtccctcgggggtaccaggccacgtgtgcgattgtgtctgcctcaaacctctagtcatgatactcctgatcccatgtcaccgacacctgggtcggtgcttacgaactaaatgaatttccaaaaatcgcagaccgggggacgtgccgggagcacggtttcccgctcttgcacttaaggacctattcctttggaatttcatccgaacatataacaagtacgaccacatgggtgaaatgggacacccctggctgagtaattagctaatcaggggagccttgatgccgagagacaagtggatttgccagggtggtgtcggggaggacccctgggcttcctggcacagtatggtctgggacctaacctgttgttggtctgggacccctctcgtcggcatatggtaaacctgtgtcggctctcgaaatgccttgtcatgaaagcctcaaggacaccagacgtggctgttctgcacgggctgggtgatccgggttagtaatgtcgtgtgggtaaagtgtgccccctctgcagaggttattaaactgttcgaacagccgtgcccacggtcatgggtggatgtaaggtgattccttagcgtagttttgtttgactactactttgtgaaattgctgttgtgggtttgggttcgatgtttggaacatctgtggctgacgggatcagctaggcccgggtggccgtttgaaagttgtggtcgggtgccaatcttgaatcaatcaaagactgatacaatgcacatactcagaccgaacgagatgcactgtctcatccactccgaccggacaagatgcactgtctcatccgtgtcgtttgagaagcactcacttagttgttttaaaaaaaggagtttaactaaaatcaattgtaaaaacaacaacctttcctttgaagccttcattaaacacataattcccatgacttgctgagtactcctgtactcacccttgctctatataaataaccccccctagttgctgaagaagatgagatggatcccgctgacgaggagttcttccaggagcaagtcggctatgatgagttttagggtttcgatctagttcccaagtcgcgcctgtgatgaatggtccaagtcttggcttccgctttcctattttgtaatgcagttgtgagctcggggtctgtctgcagcccatcatgactgtaatcctactctataataaagagacctctgttgctgtggtattcagttttcctgtgataccagcactatttcctgggactggtatcggttaacaggttaatttggagcgtcacgggctagttccgttcggggctagttcggggcgtgataaaagatggtatcagagcacaggcttggcccttggacgaaacccgacgtttaggacgaccctaaggatattaagttcaaaaactacttgtgaaaagctaagccttctttttgctttctttattttcagtagtttgttgctaaaatggttactgatcttttctccctctttcaaaattgtagatggcagtgaacgccagcttcagttcccatggttttggtgagggtcaccacgtcgctcagcttcgtgacctcgcccgcttccttggcttctcgtgtcccgagtacacggggtactccgtggaccgtgttccccctcgttgtgagctttcggtatacctttacccttgtggaggtatacacggggctggccttcgcccacaccacttcactatggccaggcccactctccagatcgcgtaccaggacctctcctggactgcacttcgtcgcttggcccacgactacagccaccgcctcgggggctctgccttccggcagctcccacgccttccttctggccgcactgacaccaggtacccttgcccgtacaacgagtctcagcctgtgctgactcgcatggttgagctttctaaggctcaggccacccagcacgaccttctccttgaggcttaccactcccttgcacgccgctacgctgcactcgagacccgcctggccgaggacggtgtcacctcagttgacactacctcttgggactttggccgcctctgccacgccagccacctgtcttcccacagctcccgcggctctgctcgcactcccagtggcccgcactcccccggctcgcgtgcgccgtactcaccagtgtactctccctacccacacccagttagccccttctacacccccggacacactctagttgcttcctcctgccgtggcccacgcttcatccgcactgcgcggaagcgtgttgttggctcttccacagtgttccgcttcgactacccaactccccctccgccagcggcccgtgctgttgccggccctcgacaggttccgccggtcccttcgcgtgcgccgatctacgtttcttcgactgaggaactgaccacaggaggcagccaggcaggcgaggagtagaggaggcagtcttcagcagttgtccgtgtgttaggcccttttgttccgccgccaactctttcggagtcgtggcgaggtagtgcgtccgtgtgtttgatgtgggtgttgtttggtagtctggttctcctaggtggtgtgcgtacagtcaagctcggcgtagctctgtgacttgtccacatccgttgtatcaggtgtctttatgatttgagaaaaccagtttatgcctagtgtgtgctatctgagctgttatttattttgctccttgtcttcattaagtgcttgtccgattctcaccccgccctttttcagggagtttagatggctagccgtcctcgccgcgctacccgtgcaccgaaccgttttggttttgaagaaggcagagttgagccagaggcagatcacgagtcggctgatgagcagtctcaccacactaaccgttcgcaccacacagcatcccgcgatgccgaggttgagcagtcccatggttctcaccgctctcaccacactgttaatcgcgaccctgttggaggatgcatgccttccccaccccatgttgaaaacaacatgcagcacttgatggcatagccacagccacagatcttgcagggattagccacagccatagccggctttcagcataatgcacatggaaatggccatccccacatgggtaacaacagatccaagctgacggactttctgaggtctcgtccgctcgagttctctcagaccgtcgtgcctgttgaggctgatgattggctgaaggatgttgaaaggaagctcaacttggtacaatgtactcctttcgagaagacactctacgcctctcaccagctaagaggacctgccgctgattggtgggaaaactactgcaatgctcatcctgaccccactaacattgcttgggatgagtttgctacggcttttcgtgcaactcacgtgcctgaaagcaccattgatatgaagaaggaggaatttaacaggcttaagcaaggcaataatagtgtcaattagtacctgagtcagttcaacaagttggctcggtatgcccctgaggaagtggacaccgataagaagaagatcaggaagttcttaaagggaattgcagttgggatgagacttcagttgcttgctcataatttccccactttccatgacatgatcaacaagtctcttctgtttgaagatgctagaaaagaagctaccgaggaatacaagaaacgcaagtctaatcatcaggggaattcctcccgaggtgcacctcgccctcgctttggacaacccatgcaatatcaccagtcagtcactcatgctaaccgccagccaagctatgcacctcgtcctcagactaaccgcctggcgcctcagccgcagcagcgtgcccctagcagtaatactgcaccgaatagtgtgtcctccttcaaggcaccatcaggaatggcgtctgttcagtgtttctgatgcaaccagatgagacactatgccaggcaatgcccacaggatcctgccaactccaactcaggacgttctaatggcagcaccgccaggactcctactcccgcaccagctccgtctcgtcctagttctcaggctagtggacagggatctcatgtttccaacaacttcggtcgaggccgggtgaaccacattcaagctgaaaccgctcaggatgctccagatgttgtgatgggtatgttctctatcaactccgtacccgcaatcgtcctatttgattcaggagcttcccatactttcatatcgcaagcttttgtaaaaagaaatggttggaaaacccaaaaattgcaagttccaatgatagtgcattcccctggaagggatataggggcaactaaaatatgccccgaagttaacattagaattgagggaattgatttcctagccaaaccaataatcctagactcgcaaagtttggacatcatcctagggatggattggttggctaagcacaaaggacagatagattgtgccgaaaggtccatcaccttgcaaggacctggaggaaagcaagttcgctttacccctaacacccttaccgcaagtcggtctatcctaaccagtttgcaagccattcccttggaataagtgcccatagtctgtggatatcccgacgtatttccagaagagttaacgggtatgccaccagaccgagagattgagttcgccatagaactggcactaggcaccgcaccaattgcaaaaagaccctaccgaatggcagttaatgagttagcagaagtcaaaaagcagatcgaagaattggagagtaaaggttatgtgcgacctagctcatccccttggggagccccagtgcttctggttaagaaaaaggatggctctgagagaatggtaattgactatagagccctgaatgaagtaactataaaaaacaagtactcgttgcctcggattgacgatctgttcgatgaaattgaaggagcgaaagttttctaaaagattgacctcaggtcaggttaccatcagcttaaaatcagatctgagaatatcccaaaaaccgctttttcaatgcggtatggtctgtatgagttcacggtgatgtccttcggactcaccaatgctccggccttcttcatgaacctgataaacaagatcttcatggagtacttggacaagtttgtcgtggtattcattgatgacatcttgatatactcgaggaatgcggaagaacatgctgaacacctgaggctgataatggaaaagctaagagaacatcaattgttggccaatttctcgaagtgcaaattctggttggaccgagtagcatttcttggcacgtgatctcctctaacggtgtcgaagtagatcccaggaaggttgaagctgtacttgcttggaattcccccaagaatgtgtcagaaatccgcagtttccttggcctagctggatattatcgaagattcatcgaaggtttctctaagttagccagacctatgaccgagttgctaaagaaagaaaagaagtttgaatggtcagcagcctgtgaagacagttttcaagaaatgaagaaaagattgaccactgccccagttctcaccctgccagatatacgaaaagactttgaaatcttctgtgatgcgtcaaggcaaggcttgggatatcttaatgcaagatcgtaaggtcgtggcctatgcgtctaggcagcttagacctcatgaagtcaactatcccacccatgatcttgaattagcagccgtgatccatgcccttaagatctggcggcactacttgatcgggtacaagtgtgaagtgtataccgatcacaagagtcttaaatacatcttcactcagacagagctaaatatgaggcaaagaaggtggttggaactaatcaaggattatgatcttgggatccattaccatcccggtaaagccaatgtggtcgctgatgcactgagtcgcaagacctactgcaatgcagttaaagtatggccagaccaagatcgtctgtgcagagaattagaaaagttaaggctgatagtggtacagtcggccatccctgctagcctgacagtgcaacctacattggaatcgcaaatccgggaagctcagaaagatgataaaggtataaaagagttaatagaaagaatacacgagaagaaatacaccggtttctccatagatgaccaaggcacagtgtggtgcggatctcgcatctgcgtaccagccaagaaagaattaaaagatatcattttaaaagaagcccatgagtctgcctactccattcatctaggaagtacaaagatgtaccaggacattaagggatatttctggtgggctggaatgaagcgagatgtcgcggaatatgtggctctctatgacatttgccaaagagttaaagcagagcaccagagaccagctggtctgctgcaacccctaccaatttccgaatgcaagtgggaagaaattgggatggacttcatcaccggtttaccaagaacccctagcgggtatgactccatctaggtaattgtggaccaattcacaaaatcggctcacttcgtgcctgtgaaaactacctttgatggaaagaaactggcagagctctacatgacccacgtggtatgtcgatttggctgtccgaaaaagatcgtgtcagaccgaggtactcagttcacctcaaggttctggaagcagttgcatgaggctctcgggaccaatttgaacttcagcacggcttaccatccgcagaccgatggttagacggaaagagtaaatcagatcttagaggacatgcttcgtgcttgtgccctagattttgaaggcacatgggatcgttgcctgccgtatgccgagttctcatacaacaacagttatcaggccagcattcagatgtcgccgaatgaggcaatgttcggaagaaagtgccgcactcccttgtgctggaatgaggttggcgaagcgctggtgttcggtcctgcatactcaaggcagcagaagaacaagttaagctgatccgagaacgtttaaagacagctcagaaccgtcagaagaattatgctgacaatcggaggcgtgatcttgagttcgaaaaaggagatcatgtgtacctacgggtatcacccctccacggtatgaagaggtttgggatgtccggcaagttagcaccccgctacattggtccctaccacataacagccagacgtggcgaagtggcttatcagcttgagctacctgaaggtctcgcagatgtgcacaacgtgttccatgtatcccagttgaagaaatgtcttcgagttccagaagaacaagttcccctgggcaacatcgagctagaaaacaacctgacctacaaggaaagaccgatcaaggttcttcaagaggcaaagcgtcagactcgaagaaagaccatcaagttctacaaggtccaatggagcaaccattctaaagataaggcaacctgggaacgagaagatcatctccgcgccgagtttccggagctgctcccttaggtgctgaatctcggggtcgagattcttgttagggggattggtctctagcgcccgttccgtcgtggcacctagtgggaaaactatctcttaaaaatcataaatgcgaaaaatgtttctttgtttgttgtccagtgtccgtgccattccagatctcaaatccccaatccatcgtcgaatccaaaccctaacctcaatctgtcccgaatcaaatcttctcgaaaaagtctattttgcctccctcgagttcgtgggccgatctcttctccccggccatttcctctcagcccatctctcctctcccctccatccttgcccgcacgtgcgaggcacgtgcgccgctcgggcgctgagcaagagagctcgctctctctctttctttccccctctctctctctctgctctcgctccctctcgatgccgctcccgccgacgccgctcaaatcgccgcgccacccgttgcttcccgcgcgcgcgcgccgtgctggccgaccggccagtcgccgccgccgtcagcgcctgccacaccatcgtcgctctgccctgcttgcacctccgccattcgtcgccaaagcaccaggagagcaggtgcatgcgaaggacgcgtgaaggggactccgggcactcatcttcttcctcttccccggcccgaggccggagagatcactctcgtgccgtcggcctctcgtcacagtgcccgtctcgtctcgggagcacggtttcccgctcttgcacttaaggacctattcctttggaatttcatccgaacatataacaagtacgaccacatgggtggaatgggacacccctggctgagtaattagctaatcaggggagccttgatgccgggagacaagtggatttgccagggtggtgttggggaggacccctgggcttcctggcatagtatggtctgggacctaacctgttgttggtctgggacccctctcgttggcatatggtaaacctgtgtcggctctcgaaatgccttgtcatgaaagcctcaaggacaccagacgtggctgttctgcacaggctgggtgatccgtgttagtaatgtcgtgtgggtaaagtgtgccccctctgcagaggttattaaactgttcgaacagccgtgcccacggtcatgagcggatgtaaggtgattccttagcgtagttttgtttgactactactttgtgaaattgctattgttgatttgggttcgatgtttggaacatctgtggttgacgggatcagctaggcccgggtggccgtttgaaagttgtggccgggtgccaatcttgaatcaatcaaagactgatacaatgcacatactccgaccggacgagatgcattgtctcatccgtgtcgtttgagaagcactcacttagttgtttttttaaaaaaaaggagtttaactaaaatcaattgtaaaaacaacagcctttcctttgaagccttcattaaacacataattcccatgacttgctgagtactcctgtactcactattgctctatataaataatcccccccagttgctgaagaagatgagatggatcccgctgacgaggagttcttccaggagcaagtcggctatgatgagttttaggatttcgatctagttcccaagtcgcgcctgtgatgaatggtccaagtcttggcttccgctttcctcttttgtaatgcagttgtgagcttgggatctgtccgcagcccaacatgactgtaatcctactctataataaagagacctttgttgctatggtattcagttttcctgtgataccagcactatttcctaggactggtatcggttaacaggttaatttggagcgtcacgggctggttctgttcggggctagttcggggcgtgacagcacctatgaatacaaggtctagatactccttaatttcttgtttccaaaaagttcaacaaatcacagcagatccaaagcagtgaatgctatacttcttagggaagtaatactaagaataacactgatggattcttttcatcttattgataaagttagcatggttaattgataatgtaaaactgataacaccatatgctgctccaattgaaaccactcaaagaatataacaagcaagacactaccagcaaaaatgtagtaaaaaaactattacctcaaaggttatttgaagtttttctggacgtgtgtcaaatccaaactccaaagaacattagcccatacaagaaagtaaccagctcacaacccagcaatggtcatatgccggagacatattgctaaaaaaacctgaaacaagtgcagctggaataacagctaaccaacatgtcatataacttatcaggtttcattacgaggacaaaaagtacagcaaattcaaggtgagcagaagtgagaccaatgctccaaaagtatcacctgtcccagatttagttcaaccaaaccggaactgataagacaccatgattcaagcttgatgtgcagttatccagcataccggattaaatgaacttgtttctgaagaatgacagattcaatagcttgttcaaacccctagctctcagctcaacttactcattcactagatagcaagctgcaaaagcacaaacccacagccaaacaaataagtacatggacataatataaccgagtttttgtcattttcgtttgctatatgtaattaaggagctgaagttgaaagagttctgttttatagacaaagatgatcgctgtgaatcagttgaaacattattctcttcaaaaacatcaattaatttgttcctaaaatttccattcgcactgctcaacccacttattgcccttctcatgaagtcaggatctctccactgacgctttcagaagcatactcaacatctcacaacaacaacaacaaaataaaatctaatggaacttgataacagaatgacagtgtttcatcagattgcaagacaaaaggcttgttctcatacaacaagttgaaatgcaaaacatgtccttttctacatccaaacagtacgtgccaatttatcatcaagagttcagaacagttaacaaaaaatctgtgagaatcgaaaagcactaatgttgtttctcctccagaatcagattgttagcagggaaaatgcaccttaccataagcttcttctagcccaaagtggattgatccgaagcgcccaaaaccaggaaagagacacacgaggaatttttatgggacattaggaggcaactcctgatacaaaagaagattaggtcttagtgcagagatcaacaagaacaagttggcagtttacagcagcaaacaggtagccaggtacggtgtccaggctccaacccacctcctcgtgacgctccatggtggggttgaggaggagacggccgcggagacctgagagggaggccaatattggaacgagaccgcgagagggaggcagcgcggggaggaggcggcggcggcggcggcccagctgtactgtggaggaggtcggcgaggagatcgaggcggcattggctttggggacgaggagcggaggaggggcacacgccggagaaggaggcggcgaggcgaggagacctccggcgagcggcgcgggctctcgcccaccgttgatgctacatccaatggtagaagtcgctcccggtccgacgaactgatggtagcaaattttgcagaacagcccttgatagaatgatagcggtaaaaacttttgcaagattgggatttggtttggtttgggccggctccaagcgcaggagtccaggagagtggaatttccggcccgtttcgtcatgtgagccgatgggccatatgtgcgatacagagctaggccaactagcccaaatgtttttgcccaacaagcagcgtcctgcgcaggtcatgttcttcctgaactactctgagatgcatggatatgttcttctttttcctttttccccctttatttcataaatataaattgtgttctagaacgaaagagtttctttgacagcattcttgacctcaaaacgtttgaaaaagttaacacgacaagggagtttgaaattgttttgtaagacaaacttacggtagtacggatttgtttggttctctaccatcccactaatttattagtagtgtcaaattttgggtatgatttggcagtacccagttttagtatagtagaatagtagtattaattgtattgatttggtaaagattgaaagcaatccaaacaactactacttaaagttaccaaatatctagtaagataagtatgacgtcaaaccaaaacagccctacgtttgtagaattgtagataaacaatggaagtaacacaatcaattacttgtatggagatgtacttggtagtgcaatggtaatgggtgtatggcttcaaccctgaaatattgtgttcaatccctaatacactcatttttttttcttaaaaaaaatgtttggaggtctctcgttccaaatctctttttttaaaaaaattacttgcttgtatggaaacaacgggcagaaagacatcagagtaacaaatctgccgggccggctggagaaacctgggcaccatggtgaaatttattacactcttttctgtggcagggaaaacaacaaagcgccatgtgatagccccatgcaaaatgctatgcctgtacttgtttttcactcgacaatgcagtgccatttccaaacattcatcagccattcagcatccagacaagcgtaagcacgctgcatagctgcattgagcttacacgtcgaagaagaggtattaattcttgtgtgcaactctcaacaaacgcgaggtcgcggacgtgccagcacgagtccggcggcagctcgcggccgcggcagctcggcgtcgtcgaacgccggcaagctctcgagctcgaacaggtcggagctggactcgctgctctccttggccctctcgctctcctccgccacgccgagcgcgcgcagcagctcttccaccctcctctccgcctccgccgccgactcctgcgccgcggccacctccctctccgcgccgcgcagcctcgccaccccggcgtcccggcacccgtgctcgccgtcgtccaccacgaccgccaccggcgagaaccgcactgcccgcctcgccggagtcaggatcccacccgtcgccgcgggctgtcgccgggaagcgcgcgacgacaggatcgacctcgcggacgccggctcagcggcggtgactgccactgccgccggcgccaccgccagagcccgcggcgtcgtcggctcggccgacctggctgacctcctgttgcaaagcagagcattcagaaggcacgcgaatggcgccgacttggcaccattcttgttcttccttctgcccctcttcttctccgcgacgtctcctgttgactccggcatcggcggcggcggctgcggcggcggcaagagaagcgaaggctgtgggtcaggccgcacgcgacacggccgcggcgtcttctgcagccgcggcgaccgcacggaagaagcagacggcgacaggttgttgcactgcgaaggacggcggcggcgtccgggcaccggtgacccctcggcgtcggcgggggacgccggcaagctgccatcggcgtcgagggagtggtagatggcgtcgagcagcgcggcggagaaggacgggttctcccggttgcggcgcggcggcgcgagacggccgctgtggtgcggagacatagtgacgcccccgcgacgcgcgcgcggccgtgggacgaacgcgatcgcggcgagggagagaggatcacagattcgcaggggctttttggtttggttggtgcgttcgtgcggaggtgtccgtgggggttgaaaaacgccgcgcgcgcgcacaggtggaaacgggggcggatgacactgcgcgcactcgagttttcgccttttttttttttagttgctcgtctcttccccagcggtggagtttgttggggaggaacggacggtgagggctctgcgcggcgcgcggtgacggcgtgctggtaaagcgaaactcgagtcatgcaaagacactgcccgtcgacaatttgtacattttctttctcccgcagtggaaattgaagcgttaacagtaaaacagtctatcgatgtagtgagtgatgagttcgcgaaaaaaaagatgtagtgagtgaaaacaacgagaatcgatagcatctcttcgaaaccgacgctcaatcaatcggtgattgatcatatttatcatttaaattactcggcgttgatatcagtatgatgcagaaagaaattagaatttgcaatacttggtaacggttgtaaacggtacctcttatataaaaaaaatgacgctcggtatgaaaacggtatttggacgatcggaaatttttgtgactattagggcccttccgtatggcatgcatgtgctccgttcactgatttccatttactttagcccgtttagccggatgctagggatgctagattaacgtacgtgtcgttagttagttcataaaacagagaagctttccgtcgagcggcaaagcgagctctttcccggagcaaagaaaggcgcgggggtggtgcatcgtttctctgctggatacaatgaacaatttctttccttgtaagatattcgaatcgtgctctttttctaactacggttcatgatggtgcaggccagtgccgacgcaaaagcttgtataaaaaactaacttataaacctgaaccctacaaagtaaattggcgatgaaacaccacccaccatgattgatgcttaagacgacggttatgcaactctttttaagctatggatggaaattcataaacagactttaataaatgtgttcttcttatcttggtttggttttttattttgttgggtgtgtttaatttcatttaaactacacattttgttaaagtgatactttgtaataattggatgtagctctgataagtaaatgccgggatgtttattctattatctaaaataaaatgattgatgtgttgaacactggtcggtacactagaatatggtgatccagacgtgcacgtacatcgactcgctgcagcaaaaacgttcccaaaagagttcacgagtcaggcccacactgatagtcttcgcgcgcgtcctccgcacgtctcttcgcgatcctccctttcgcgcagcggcgcatcgcatatgggcgcgcggtccaccggacgacgaaaggaaagcgaatccaccgcgacattgcgccgcggctaatgatcaactgcgccgcagccgcccccacattggccactacgcgcacacgcacgcagcttgtctcgtctagtctaggcttcctccactttttatcgcacgtcgtcgcacgaccaatctgcctatgtttttgtttgaaacgtcccgcacggggcggccacgccgtcgcatgcacgtcacgggcgcctggcgcggtggcgctctcccggcagccgacgcgcctcgtcccgtgcgcgcgtgccatggttggcggttggcaacgccgcacgctcccacgctggccacgcagctagtaaaatcgagatgggcctaaacttcccgcccgcgtgtgtccgggactccgggtccctgatgccggcctgttccgtgggtggacgagaagctccgacgagaagtgtactctccctttgagcatgagcccgcgacgagagctccgcatgtctttctctgctctgctcccacgttgcgacattgtctcttggatgcagcctaacgagctcttgtcgacgatgggcttagagcaagttcaatagtatagctcactactagctataaatcatctataaccaatataatagtcaatttatacaataattgtttattgtattattaatatatggtcccacaatgtcatacaaatattacgttttgaagttcgtgctgcagctagctacagatctgtagccagctgctcttctctcttttcttttaactctttaaaatatgttttatagctggtttatagacagctattgtacctgctcttaccaccatacctgttagcgcccgccatgtttattttcctcctgatagtcatcatggtggttctttctcgaactagattcggctccaatgtacgagcaggctggcacgacgactagctgtggtctgtggaggaggagtgtactgaggaaggtgggagggagagaaggcagcggagggtggcacggttcataaaaccgatggaatttcatgaaaaccagttgacttttgtgaaactgttaggtctgaatttatgaaaaccggtcggtattagctagttttccgtacggcgttgactaaaaatcgttggtttttatcgtttttgatcggatttggtaaaccagtgaagagcgatttttttacttcgaaatcgaaaagttaaagcctagaggagtacctaagacgacaagggggtgagcgacagtgagggagatattaattattttaaaaacatattcctatatctttcaaaaaaaaattctcttctccttaaaaaacttttaaagaaataaaaaagaatccatctaagtattaatgctccttctcccttaaaaaattgacctcacttttcaaaaaactataccctaaataacttctttaaagaaataaaaaaagccaacatctcataaaaatggattagaaataaactaaatcatatttttatctatagatcatattgtaatgcataggcatgcaactacccctctatttcatattatgagtcactttgactgtcaagcttaaacaaatttgactaagtttatagataatagttagcaatatctactatgcaaaattagcttcattgaaatacccccacatggttatcggctccgcggacctctagcaatattgtcattgaaaataaaaaagatcgagaaaataagaagaaaagtgaataatgaaatagtaatatatgttaattttttagttttacatcgtattacagtgaagaacaaaattaataataatagtatattatcaaaacataccatggatgtaagcaacttcccctccccccatgtgttttggctagtgacattatcccctcttcctatcttctctcaaagtcccccaatcatgtttaggtaaaaaaaagttctattatgactaaaataaaaaaaacgattcgactatattatttttcaaagagaattcattgtgtcactgattttgactcgttatataatatgatatcgtattttgcttaacttctattccatccgtctcaaattataaggcatgtatttttcttacatggtctttactgacatactctaaccattaatttactctatattttgttgccaacgaatataaaattagcatcacatgaaactactttaaaatataaatctagtgatatacttcatccgttttacaatgtaagtcattctagcatttcccacattcatattgatgttaatgaatctagacatatatatgtgcctagattcattaatatctatatgaatgtgggcaatgatagaatgacttacattgtgaaacggaggaagtaacatgtataatacttagcgtatatatatttagtatgattgttagttaaaagttactgagcttgatttttcttaaaaggaggacgcctataatttaggacggagggagtataatataccatcgccctctagttagactccattatcactgtataatttttttaattaactcacgcaattatccatggaacaaaaagtgttcaaaattgaacaaaaatttcgaaatatcatattatgaagtagcacaagattatccatctcaaactttaagtgcagttttaaagtaaaaaaactgagatagagtggagcagctcgagtatctccgtatctcccccttcccttcgcgtaaaagaaaatcccccgtctcgtctcctccgctccttgcgccatctcgcggctgaacaggggaggggcgccgatctccgtctggcgcgcagagcagggggaggggatcctggtgagcatccacatcctctttctggttcatctctctcccaccgggagtacttttgtctggaatttgcttgcgttaaccctagtttctcttctagatctggaagaagcttcttctattgatttcagagccttaaccttaatacaagaaacagtttgtttgttcccccatgtcccaagttggatccgcccctgtctgccagttcagtagtttttggtgggattttgaggatctcactatggtgtgtgatcgcttttgtcattcccaccacacatggatttgctcattttgtaataggggaaaaagagtggtgcctaaagatagcgtggatcatatcgcaatagtctgtccaacaattacctgaatccttttgtttagtcataaatccttgcaaatgttctttatatttgttctctctactctccaggattgctgaattacttaattgacttaatcttaatcctaaacttattagctgactgtagaatttcaccttggtagacttcgattagtaagggtattggatgaagcttgtactgatctatggaggtgggtggtccacaagatgctctggacaacagaagtgatgataatgactttgataagaatgacaattctgatcctgttgtttaccagttagttcgggtaagttctcatcatagggtctattggctatacactaatatacataattggttccaattgtttagtcagttctttgagaaacacattttctttaaaataaaatgttcaggttgaaggtgatggaacacttattcctgctacggaggatgaggtcttacagtttgaaactttccttcatgatgagaaggttgatgatgatctgccttctattgacgatgtaacacatgtggaggaatattttactaatgattgcatagtgaagaagcctgagtttgaaggtgccctcagaaatattattctatctcaatttctactttattgtcatttctgtttgggtgatcatacttccttagatcgataactgaatatcatgccatgtgaggataaattgtagtttgcaagctagcatgattaatgaattgattcgattggtttgattacttgagatgttgacttattactatattttcacagaggggccttccaaattagacactgcagatgtacagacacaaaagttagatgctggcttagaggtatattgcttatccattgtgcatcatgaacatgattcactaaacctatgaggtatattgcttatccattgtgcatcatgaacatgattcactaaacctattttctgtttcattcaataccctcactaatcgaagtgaagtatcttcgattgagtataagcattttatgaccagatagtatgttaattctattagataataggtttagtttgttcttaggtacctctgtggtcatttttttcaagctaattctggcatggtaaaaatatggattagttcttttttgtctaattagcagttcaaagttcaattgtatgcggtctcaacaaattccacttttgtatgtaacaactttgtttagtactagttaggaacatatttttatcgtcatcaagaactgacatagagatggatggatggatcaaaactatgggatgagcttcaatgtaatgagaagatgctgagttctttaagtgaacacaggatatgcggtgagacatatctgactgactgtagatcattgaaagatgtggtaataagagattgatctgtgtgaaatacaatcccagggcaatctatttttatttgagcacttcccttaaaaccatccactaaacatgcacctgtatacatcttctttcaatctacatattcaagttgatgtaacactaaatagatgcatatcatttcacaggaagacaggttatgtacattgaatgattcgatagttcttccttcaaattgttcagctgttcatgaccagcagctggataaactaaatacagaacaaggggcaaatatcattgcccaacaggacaatgcttcgactgagactacaaaatcaacagtattaaatgacctttcttctgataaagaaaaggctgatgcctgctcgaaacctgtaaatgaggcatctgcaggacaatctgtttctggggttactagttcagttcctgatttttccattttaaagggagaagtctgcttggatgatcttacaatgagagaacttcaggaagcatttagagccacatttgggcgtcaaactactgtcaaggacaagctatggctcaaaagacggattgcaatggggttgatcaattcatgtgatgttccaagttcaggttgtgttgttagggattataaagttattgccatgggtgccaaacaagaaataccagtggttgaagcaataccaaagatggaacttgaggctaatttggttagggaccaagtaatgaatcctggacatgagagagatttaccatcaagtctttcctatcatagtgaggagcaacagagatcgtccaagagactcaaaagagtaccaacagataatgatgaaccacaagtaactatttttgccgaacaaggaactactaagagaattagaaagccaacaaaaagatacattgaggagctctcagatattgacactcatgaatccactgggagactttcttcacctggaaaaaggcatgtatatgatgaggtgttattgagaccacggatagcgcctttgcatgaggttgattcgttgagcacagcctatcctactagagaagatactcttggagggtgtagtgtgcatgtgccttatgtttcaaggatgagaagggggcgccctaggagtaacttcattccatttttggtaattgtctacctatgcattatataatcttccagctctggacaatttgactaccatttattatcattgtgacatttgcgcaaatattcgattactatacaagtatacaggaccaacaatatatttggttactccatttttggaactattttagggatgtcctctttttatgttagatgcttcctttttctgctcctttttagaatttcttcttttgatatgagattgcaagtaccttctctatttatcaaaataatatggatttccataaagcattatgttaacgcattttggcctgtaaattgcttcctgctcagaatgcatctgacctaagaaacttatctaagggaaaatgttcttggaagccaactaactaaagactcatgcccattttcaatcaagcagattattaattttctttttcacaatttcactctttgcccatggtacttcctacaaacaccgtgtgctatatttcataaattaaatgtgggaaatctctgaactttttgttaactgattttgccattgtagtctttatttgatagtttcctcatcattgtgccaatattccatttgatctgatgtaccatattgcaccatataccaattcagaataatttaggacaaaaccatattttcatgtgtcatacgctattagatttggtataattatctcaatgtagctacctgaatcctttttttattgcatcaggatcctgagccttctgtggaatgtactgaggcccctgctgcagatgtagtgaatttggaaaaggaaggtgaacggaagaaccatgtaagcaaagccatagaagttccactagtatgatgtttcttcatgttggacaatatagtgaaaatccaacttcagaatgaagtactgactagaaatatatttgaaacacatagtacctcaatggcttaatgctgtgtaatctacttctgtattatgtgttatataatatttttcttcaacttgctagcagaagaacactgggaagaaaggagtacatgtagaaacatcttgtgaaaaggatgttcagggtctgcaggacaaggatttttgcgactctgatgacaatcccaaaacaaagcggggtgggaagcggaagcatcatcgagcatggacattgtgtgaggttgtgaagctggtcgatggtgtggcccgatatggggctggcaaatggtccgagattagaagactagccttctcatcatattcgtaccgcacctcggtggatcttaaggtgcaattgccttttcaactcctaggtttgttcgtgcattttatttcttctaatgaatcatgatgcttattcaggacaaatggcggaatctgatcagggccagccagacacaactttccactgaaaacgatgtatgatgaacaggctgttctgttcgacctactttctcacgttctggcattttttcccctttgctttgcatcttgatttatttacccaactttctctttgccactgaacagggtgtttgtccacggaagagcaatccttctgccataccgataccagtgtcgattctgctacgagtaaaaaaactggctgagatgcagtctcaagctggcgacgtgagagtgccgatcaagttttcagggcagagcactacggttgtacaggggaaagtttcgggtttcttgtgatccacgtgttgcatgcaaatagagggggaaaccactgagattgatgtacgcttttggacgtctgtgaataccacacttgtatagcaaagttgtgatcgcgactcgcgttctcgtgcaaaagaaagagtcgacgtatgtattgtttgctcctttttctacacacgaacacttcctatgttctccgagagatttgactaacgtaccttgagattgacatagtcaccttaaacaccttgttattgaaagaataaatgctcctttttcgtttgcacggatattaacttcttctctggatccgcttgtttgcatctaacccaagtcctaatagccttgcgaatgtaaaacagatgttcgattgcatggaagagcacaagagatttcttagtcgcgacagagtaaggctttgcaggcatgtacaaaccaaaactaagggagaaattgcactgcagctagaaggcaatcatttgatcgagaaaaaggtataaaagctgatacattaagtggcgttaatattaaagtaccggcacaaaaatggaaatatcagcactaatctggatataaactattaaagcactaatctggatataaactattaagtggcgttaatattaaagtaccggcacaaaaatcgagcaggagggcgagggctatgggcactgcaacacctcacctcgctcacctcaccacgcacgagcgagcagctgatagagtagcacagtctgctaatgtagcgccgaggacttggagatcaaatccagcagaaatttactttcacccgaaggatcaaccttctccactttgaccgcggtgttcttcactttgcgctcatcgccgtatgattcttctttgaccttcagcctgagcagatattcctgaaacaagcaattgagcatggtgtctgcaaaccgagggtcctcgcgctccttaagtgcgttgagctctgttgccgagcagccaagcaactcctgcccagcctcctggaatgctgtcacccaagctgttcccgagtgatcttgaatctgaaactgcaggagatacctgtagtcgcactcttcaaactccctatcgcatttgtcacaggtccaattgccattagtactctttgtcaccttcttattgcactgcctgtcgccaatcatgttagggcaagctgtgtagaagaaggactcattcttgaagaatataacggtggctttcaccgtaatccagtcaggtttgtcccccattccaagaccttcatccttgatctgtgctactgtctttcggatctcattccttgatgctccaggcgtgatatctctggatatggactgagtagaagcatctcttcctccactatcaaaccattgcctgagactatgagcttcagcagaatcagggttgatgaagagctgagttgaagaaattgtgccgacagacttgccactgaaatcactcacttttcctgctttgacagccagcacaggaaagatcccacgttcaaccattccttgaagctgtgagccttctctgttgcaaaagtcaccccacatggttacctcaacacttcgaccagacatatccttcaggttcatagttcttttctgagtttccatgccatttttcctctgtattgtggtgcaaggattgaccgatgtaacaacacctatgatgtcaaggatagcattgttctgggcatcctcaatttcattgatcggtctgaagtcaaaccgctgggtgggaatggaactgttctcatcaggacaaagatccacagttgatccattctccaataaaatctcccactcattgttaagatggttatagttcttctgtgcaggtctcaagtttcctcttgataccacatagaccttaccaacttccacaacttcatagaatcgatcaagaagagcattgaagcatgtcacccgtatctctcccccatcagaatcaagcaagtcaaaagagaatactttcccatcacctttagcattatggtatcggcggatatctcccttggcagtaactctagccttgatagcccagcggccttgataaggatttaaagcagatatggggattattctagcaggggcttcatttttcatgattgctccatggtttttgtaattaggtgcagggcgataagatggctggactgttggttggaagaccggaactttgtcactgggcctagtggcaaagttagaggagtttcctgccatcgaattttggaacaatggaacattgtcactaggctttgtggttgtatttgatgagttccctgccatcaaaccatattgaggtgctccgttaaattgctctactcttgtcggatttgggataggagatccagtttctgaaagcgctgtaggattcccaattatctcacactccgaaacaagaacttccaggttcagaatgacaataatcctacaggtattgcaacaagtcagctcaaccaacaaaaaacaattcttgattctgctctatcaaccagtagatcagttgaaaataagaatgcaaaaggctcagaatatgatgattcacactgctacatgaatactatgtttaattacaacaccttttggtcagaaacttatcttcacttttgcatttgtcgccttgccaacatgatttgaatggacacaactatgcttccaattacttatgaaccagatacaaaagaaatgcatttagtacggtgttgtgttgaactgaatggctacagctaaaagataaaaaatacttagtacttagacccaaactgttcacagcaccagacagttgcagcattaatgctgatcaatatctaactacattggccaaatcgatgcacccaaacatggcgatttgttggctagagaaaaaaaggcacacaactaaattagtgaactaaatcagacaacactgtaaagtgtgtagtagtcaaactgaccatattaccttcatcgtttgacatgctacctgccagaaatggcgaacaccaaaggctacccaagcacatatatcacactattttgtaatcgttaatactaatgccagccaattaactactgagtatcgacaaacaccaatttgtgtcacaggacagccttagttaccactgattagtactgcaataccgaggcctctttctgacaataataattcaaatcagaattaaaatcaattggacaaatggttaacaagcaccgatcaaatgatgtcataaacaaaaccattgtcagaaaaattttgatgcacctctactagtatctagtaggaaacatgaagctcatcgacaatttaccaacagaatggcaagtactaagtattaatttaaattgcaaactagctgaaagcgggaatctaaaccacacgcagactgacacacataaaaccaggggcaagcatgaaccctaaaacgaaacgggccaaaaatcgcacgcaatcacacatcgatcagaggcaggggaatgggggggaaagtggaggaggaggcaacaaaaccttctggggccgacttcgttgatgacgtactcgctgagctgcacaatgctgccgcgtcggagggcgccggatcgggcgtggtcgctgagctgcgcggcgaagagcgcggaggacgcggcggtgccgtcggagaccaccgcccggaacctctccccgcgcgtgacgcccgcgccgttgacctggacgccccgcagctcgacgatctgcagcaccggcttcaggttcgtgtcccccgccagcgccgccgccacgccgttcggcgtcagcctcgccatcgccatcgccacccgccgccctcctccacctccacctccacctcctcctccccctctccgcttcaattcaatccgacacggagaggcgcggattaacgggaaaacccccgccctggatggttggaacttggattgggacgaggaagaagggaatggttcgaggctttgagctctcgaaaattcgaaaagatgcgaggggtgaattagaaatggtccgctaattaatgagagaggcggttgatgtggaggctgctcctttcggaggaagacatcgacacgcttcagatacaccagccgttggatagatttggcatgatcgcatcggacggccacaatatcccagagtggatgggctggcctgggcagggatgagttcgctgcgggtgggccggcccatctcgtattctgatgggccgtcacgcggcgcggcgaattcgaagcctcggcccacgttgccgcagcggttgacaccgatgagtgataacgcggtccagtattgtggtgattggctgattgcttaccattttgcacattgcacttctatcattgtgcggccatgtttagttcacatcaaatttcccccaaacttccaacttttcatcacatcacgtcacatccaaaactttcctactcacataaacttctattttttttttccaaactaccaactttccctaaactttttcctaatttcagaaactaaatacagcctcattgagtagttcaatcaggtgcaggttttgggtcattggatgggatatgagacactgttcactagcaggggggggggattgcattttgctgtaagctgtgcgttgaccggtataaaagatagtactcctggagtagtaacaacaaatctatgaagaaactgtggccgtgtttagttccaaaataattcttcgaactttcaacattcccattacatcaaaggctgtgtttagtttctgaaattggggagaagtttggagaaagttggtagtttggaaaaaaagttagaagattatgtaagtaggaaagttttggatgtgatgtgatagaaagttgagagtttgggggaagtttagtgtgaactaaacatgccaaaacttttctacacacacaaacttctaacttttccatcacatcgttccaatttcaaccaaacttctaattttggtgtgaacaacacaagctgtacattgtttactcaactggaaaccggccatcgagggtggacgaaagcaaagagtgggttaaatccagtagccaaccaagccgagccgcatcaagtgatcaaggtcctagttttgtttcgtttggtccagggtttgtatgatgtcaccgcagtacaattccagcgaattgaagggtcccctgacgttcagctgacactgcagggactgcaagtagcagcagcagcactactaccaccaccagctgatcatttactgttcttaacacttgcagctgaaccactggttgcggcctcctgacagatgctgatccctgacgaccagctctcagattgaggcgtttagttaagcggctgtcacgagaaatgctgtcgcgcgccgtgacatctccctcccctacacacggaaaaccaggccacatccctgcaaaaaacacatcggatcccttcaccccaaacgcgcgagggattttaaactaaacgccacgatacagcggtaagaatctgaaactgaacgagagcgtagtagaagtagtcgccgacctcctcctgctccgtaaactaaccgggagagaactccggcgcccgcgaccaccacgttgcagggcctcatatcccgagggcgtcagatgccctcgccgatacactaaaaaccgaataatctgggcaatcagtctgtcctaactcagagttgccgcgaatgacgacactagtttaattcaacctcttcctgtcagtagtaaaatcccaactgtctaggttgcccgtgcacgcatgtgtgcaccgctgctaaaaatctcatctccacagccttttctcccagccatgactgactgaacaacccgtccaaaacgggaaaaaaaatctccattactccctccacctaaaaaaaagacaaatcctagttttccgtatccaactttgactatccgtcttatataaaattttttataattcgtatttttattgttgttagatgataaaacatgattaatattttatgtgtgacttgtctttttaattctttttataatttttttaaataagacggacggtctgggtttgtctttctcttttttttttttttgaccgagggagtacgtgccacgggatcaggtgcaagcacatgcgggcttaacacgcgagtggtcgtggtagtgggggaggcgaagacagtgtgagcagaataacatgccgtcacggcctcgtctcgtcgcgatattgcgagccaaaaccgtgcaagtcgtggggtcacctgagcctctccacgtgcgattcaccgcatgctgcactgtggcttgcttgtgcagctgatcctccggttgatgaatgaatggttttgaacgttctcctctctatgcatgcgtttcgttttgctgacgagatgggtgcagagccgcagatgtgtatacagagtagtagtacagcctttttattgtacgcgtacgtgctggagacgggctcatgtgggctctgtcgtgggaatactgggcgccgtggatttgttcaacttcgctgtcagaacagatacgtcatacagtacgtgctccgctggattcggtgatgaagatgatacagtgacagctgagtttttcctcgttttggagtaaactccagattagtagagtacgcgtcgaaaaccagcacatataggcaggtgccagtactacgaaaactgagggggtgtctgggagtagcctctttctaaaaaacataagtctctagaagagaaactaaagtttagtactaattcccaaacactctctcaggttaatttctgctgttggatgaaccgaaagctgtaacgcgggacatgtaatttctgggaatttcttcagtaacaattactccatgtggaggcttgtgtcagggaaggcaatccctgtggtgcagtgccagtagtagtgctgtggacgctttggacgaagtcaggtggcccccgcgcgtcagtggcacagctaccggtacttgagccggagactgtcacggtgctggccggcagacaccgtctcgcggcagacagcaagtgcaggctttgaaggctgcagctgcaaggaggagaggcttgtgtccaatgctgcactgtacatgatggatgcatgcatgcgctgcagactgtgtgcgaggcaggggaggagaggcgacggtccaaacgccagcaatggatcattcaatcgcatggacgcgagagctgacagcgcctgacattgtctcagggggccggcagcaattgcagtgcagttggcattgaatccatggagaccaaagcaggggtgctggtcagtcatcacagtcctccatctctccctctctctgagtgtctgcaggaaggtgcaggagtgggggcactgcagctactcctagctctgcatccagcttcttgcagcattggccggtcaatgggaaaacggttcaggggagaatagaccctgggagaatctttttgtttgggactttgcagtgataaccctgaatgctaatgatcgacagcctaaacggttcaacaagtgatcaacctagtagtaacacttaagaagaccaatttggtacttgcacagtgtactcaaccaactgacgaagtgcaagagtacggtattaagcatttccgttgctcaggagcaaagctgttttacgttgcactggtaatgtacttaaggaggggagtggagtacacctagcaatactactactcctacaccgacttgtcagaaagcataaagtattctctgaagcaggatggcgctagtgagcttttcagcagaatccagagatgtgacttactccctccttcttaaaaaaaaaaaaaaccgtgtcgaccgtccgtcttatttaaaaaaaatatataaaaaaaataagtcacatattaatcatgttttatcatctaacaacaatagaaattttaattataaaaaaatttcatataaaacggacaatataaaacggacacgttgacccaagaatccacggtttgctttttttttttttttcggagcgagtactatcacaggcagaggaatcggaaagaagaaaaagggcgttcacaaaagcgaacacgcttgtctcacaagctgctgcagatattacaaggactgacaggaaccaggcagaaaatctattcctagttggttcaggaagagtctaacctaattaatcagcccgaccgcatcattctgaggccatttcggagaaaatgtaggagtaacactcgaagcaacattacaaaaagctcaacgaaaagaagtgggaaaaaaataagaatatcatcagagaactcgtaggaggtttcggcctgtcattgatgaagtcctgaaagatcgaagcgtgattagtttggagatgcaatgatcgatcgatcgatcctggagcatcagcatgcagctcgcacgccgtgaaagaagctgttgatttcttccgcgtgttgatcacttcttggcttcttcaagagattaatcatctgcagattgcacaagaccaaacaggaagcaagttggatcatcgtcagcacggctcgccataagaatcaagaaacggttctgatcagtggagacgaaggttagtactctacgcaccattgtggtagcgggaggtggtggtgatcgggaggtcgttggcggccatggggatggacatggacagctgcgtctcgccttcgagccccatccaggagcccttgctgttcttctcatgcggccactcgtcgaagaagtggcggagaggtttctgcgccgccgccgcgtggtcgtggcccgccggcttctccagacggaggtcggcgcccaggaggaagcagtgctgctgctgctgctgctgctgctgttgccgcctctctttctcatcgtcgtcctcttttgaaagatcaatggcgtacggcgacgccgcggtgtggccgtagccggcgcccgggaagagaggcgtggtgctctgcttgggctccatgccgagctgcttgaactgccactggccgtgcccggcggcggcgtggtggtgctccctctcggtgccatcggagaagaaggcgtgctcgccgtgcacctccttggtggcgtgcccgtacgcgtactccttgtggtccatggagtagtaggacggcggcgggtgcgggtgggtggtgtcgagctggaggtggaacgggctcacctgcgcgtggtacgccgcggcggcgggggtgcgcgcggtggccgcggcgtagggcccgccgtagagcgcctggtacggcgccgcgtcgtgcggcgccgggcggctgtaggagggcgccggggaggaggtggtggtggtggtgggggcgacgccggcggaggtgttcgacgcggcggaggtggcggaggaggacggcggcggcggcgtggccaaggacatttccacaggctttcttgaacggttcttgccacggtgcatgtgcttctcgcagtacttggagtccgggtacgcctccttggagcaccgccacttcttgccgtccgtacgccggcatcgccctggctccgggtcctccgccttccgcccaaaccccatgccaaagcaaccccaccccactgcattccaaagaaaacaccaatcacaatatggactttgttagcatcggcaacaacgcgtacgtacgtacgtggaggaggatgtgtgtaacgtacgtgaaggttggggagggaaggcgagggaaggggaggtggcgagggcggagtcgaggaggaagctgcggcggagggggaggatgaggtcggaggggatgggagtcccggacgccatgtacttgtagatgagcgcctggtgctccagctcctgccactgcgacgccgtgaacgggtaccgacctccgccggcgccgccgctcgggcgaccgctcatcatcatcatctctgcaacaactacttcagctgcgaccgaccgcctcttcaccgaccggaagcgagcgaagcggtctcgcagtacaggcgccgcgggcgcgcgctctagctgctcgggagatcacgcggatggggggaggggtgagggtggtggtgtgcggcgagtggagcgggagagctctcggtggctggggttttgtaatgggcggggaagggtggggtgagggtgggaagcgacgtccgtgcgcatttaagacttgcgagccggaggctgtttccggatccagaagaaaacccgagggtaatactgcgaaatgcgctcctgcctgccaaaaatatcaggtttcggccatttattaatacattttctaattaataaacggtgggttttaattaaacgaatgtgaattctataaaacgttactgtactactacgtaaatgcatcaactatctttcaatacagtcaattagtcctgcataaaaagtatattttaccttttaaaattgcaatattaacgtatagagttggattatcatgagtctaacttatatatactccctccgtttctaaatatttgacgccatcgatttttttaaatacgtttaaccattagtattatttaaaaaatttaagtaattattaattctttttctatcatttgatttattgttaaatatacttatatgtatacatatagttttacatatttcacaaaagtttttgaaaaagacaaacggtcaaatatgtgctaaaaagtcaacggtgtcaaatatttagaaacaaatggagtattttacgtatgtacggcttagacgacggttagaaagaaaatcactcggactggcattttattgtgacatcatatgaaccagatatgttattgaagttctagacatttgtaaactagaaggtaattatctaattaattaaactttaaaatgacatatcaaacatattatacgagccctatagtccaaataagatctaatctttttttaccgcttcagcgattagggtgtttttagtgaaaagtatttcaacaaatatattatagtgtgaattaacactaatgcgttcgtcaaaatataataacccacgaagtagttgacaccaagtatgtattttcctgtttagcatgacagtttttttccctatgcatggcacctttcaagttttgccatttatattgtcggaatataaccgaatatgcaaagtgagtgtatatgtttacaggtgggtgtacgtttataatgtgtttttttttaaaaaaaaacccaacatctttagttaaggtagtgatgttattacttcaactgtttctaggccggatagaaatttatagatctttcacttctcattaacagtgagacatttacacatagggtgtgtttagttcatgataaaattggaagtttactccgtgtttagttcgaaaataattgttcaaacttttgacttttccatcatatcaaaactttcctacacacgaacttccaacttttccatcacattgttcatatttcaaccaaacttctaattttggtgtgaactaaacacagccttagttgaaattgtaacaatgtgacggaaaagttgaaagtttgtgtgtagaaaagttttgatgtgatgaaaaagttggaagtttgaagaaaactttgaaactaaactcggccataatagtttttagtcaatcactttcattctcaggactcgtttgtccagtggtactatggttgtatttagtttctgaaattggggagaagtttggggaaagttggtagtttggaaaaaaagttgggagtttacgtgtgtgtaggaaagttttaaatgtgatgtgatgtgatagaaagttaggagttgggggaagtttggggtgaattaaacagggctttgtttgccactggctactgttcttttgcttggacaagcgacatgctttatactccttccgtccttttctttgtgaaaaaaaatgtcaagaacaaaccgtaggagtaggaagaatggaaaataaccctaccgcacagtacagatttgtcataaaaggatgcttgcaaccaagcagcccacgtagtagtacgtgcgtgtgagcgaagcagaggacatattttttttttcttaaaagaaaaacgtaggcgtgcgaacgatggcctgtttgaatagtttccggatatttaactccgataatttatgtcccgggtacagaagataggtcattcagtcaagatgcagaggcagagcagagagtgcgctgcagaatctgctgtgcgcccccctcgtgggcgcgcgcagccgtaggaatctcacccgcaaaaactccacaggttcctcgcgtctcccctctccccggcgacgacgcgagcaactggccaccgccgcttgatgccgtatttactgtagtcgtaagcgctttggtcgtcgtctctatagtctagactgtcaccgggaaactttggctcccatcggatagcctattcaactaaagaaaaaaaaacaaaatttgaatttttaaacttaattttgacattgattttgagatatttttaacgtagtttcttttacggcattggcttttaaatcaccgagaacacatatataaaacttttatctacaaattatttttattctctaataagccgttttggcttactatgaaaaaagccaaacaataaggccctttgcatggcgtatagcttgttcttctatccaaatttttgacggttcgatctttgtggaaaaatttagtttcaacgatgaaccacatcagacattgatataaaaaataaaccatgatcttagcatagaactactcatccacctgataagtggttagtgcaaaggaaccttgcaaggacgatacacctagagcttgccattgctatccctcatcgagctctatcaaatacagtgttggtgtggtctcgtcaagcttcgaaattcctagctaatattgcggacaactcacctagcacaaaatggtgacggaggataaaacgtagcgccaccacagcctcgttgatatcttaaacttctggcctagtctcggtgaacaactcgtttaggacgcaacgacaacatggtggtgtcaaaatatatggtgtttttggactttgacattaccaggcttagcgctgatgtttgtggtttatttttatacatttcaaataattttgagcacaatttagttttcagataagttatattattattttttgggggctttcttctgaatattaccgcaagaacagtatttctagggtagtagtaaaatctttcgggcgtcgaatggtagttggtgcatgtagcagtagaaggcactatgggtttctatagttaatgggcaatgctggtcggtgtcagaggagccctgcgggtggatgctgccacggtgccaccatgcgcagtagcgagaggccccacttgaatgttattgtttattattattattgactgcaacggtgcaggttgcagatggcagcagcagtgagagggagacaggcagactctgacaccccacgcagatagcctgcagccacccaccccacacccacctcacactcatctctctctctctctctctctatatatatatatatatatatatatatactcagaaaaaaaactgtgcaatttctttgtgtagagtacaccagaaatatgtactgttggtcaccagttgggcgatacccaccgtataaaaaatcaggatccctcttcgctgtactactaccactccaggtgagagcatgcacacccttttggtcgaattaatgtgtcattagaagtgaacagtcattgttccgtttaatcatactgtctcgtcctatgaatgcgtcagtcacaactcctaatcaggatagcaagtacaacatcatgattacatactcctactacagtcctagttgcactactactagtattagagcaagtttaatgtactagtggtgtagctaactaattaactaattgctttaaatcatttacgatcactttaataatcaatttatacgatagttatctataaacatatcacatatactacactattaatatatggtccctattatacacatgttgtgttttagattccgtactgcagctggttacagatctgtagcccgctgctactctctctcttcttttatctcctcaatatgtatttatagttggcttataatatctgagaaagcttaatagtatagcccactactagctccaatttatctatagccaatctaatggttaatttatacaatagttgcttactatgtagtgacagaaaacacgaggcctgggagatttgcttaactccagtgcaggtccaaagctcgcctttgggtgtactagcgtgccagttgatttgtcacgccccgaactagccccgaacggaactagcctgtgacgctccaaattaacctgttaatcgataccagtctcaggaaacagtgctggtatcacaggaagacagaatatcatagcaacagaggtctctttattatagagtaggagtacagtcaagttgggctgtggacagatcccgaggtcacaactgcattacaaaagggaaagcggaagccaagacttggaccattcatcacaggcgcgacttgggaactaggccgaaaccctaaaactcatcgtagccgacttgctcctggaagaactcctcatcagcaggatccacatcatcctcttcagcaacttgggggggattatttacatagagcaagggtgagtacaggagtactcagcaagccatgggaattaagtgtttaatgcaggcttcaaaagaaaggctgttgtttttgcaattggttttatttaaactcctttttgaaacaactaagtgagtgcttctcaaacgacacggatgagacagtgtgtctcgtccggtcggagtatgtgcaatgtatcagtttttgaattgattcaaggttggcacccgtccaacagctttcaaacggccacccgggcctggctgatcccatcagccgcagatttttcaaacatcgaacccattccacaacagtaatttcaccagcagtagtcaaacaaaactacgctaggaatcacctcacatctgcccatgacagtgggcacggctgttcgaacagtttaataacctctgcagaggggatacactttacccacacgatattactaacccggatcacccagcccgtgtagaacggcaacgtctggagaccttgagactttcatgacaaggcatttcgaaagccgacacaggttcaccatatgccaacgagaggggtcctataccgacatcaggttaggtcccagaccatactgtgccaggaagcccgagggttctccccggcaccaccccgttgaatccacatgtctcttggcatcatggctcccctgattagctaattactcagccaggggcgtcccattccacctatgtggtcacatttgccttatgtttggatgaaattccaaagaaaacggtccttaagtgcaagagcgggaaaccgtactcccggtacattccccgatctacgattttggaaatttatttagttcgcaagcacctacccaggtgtcgggtttttccaagtcttttataaaaccccaagttttacccatcgttggatattttaaatttcaagggaagtgttccgatgctcgagcccgaaggcccatgcatcgaagcacaacagtcgacaaaggagatctaagtgttcaataattcaaggagggtaattgcagcaattaggattgtggccggcaagctatctcgcaagccgcggccgaaatacttgtgttaaacttattcatgcaatatttgcggaaaagaaatacttagatttaaattataggtgcaagatgatcaaaggtgacttgccttgctcgaaatcttgagcttgatcctcgaaatcctcgcactacgggtcttcgggctccgaaactacacgcgaaacgggacagctcaacaaacggcaaaaataaagccctattattgacctctaaacgtgccattaaatagatatcgagatttgaggagttttggaagttgaacggagtcaaacggacatacggttgagaagatattgaatttctaagattattggatttttgttctaaaggaaaaaggatttaattaaacccttttgaaaagaaaagaaagagggaggggaaacagacttccctcgggcggctagggcgcggcccgagagaaaggggcagctcggccaagaccgggtcaagccgaccccggtagctaatcaggggagccatgatgccaagagacatgtggattcaacggggtggtatcggggagaaccctcgggcttcctggcatagtatggtctgggacctaaccgggtgttggtctgggacccctctcgttggcatatggtaaacctgtgtcggctttcgaattgccttgtcatgaaagcctcaaggtctccatacgtggccgttctgaacgggctgggtgatccgggttagtaatgccgtgtgggtaaagtgtaccccctctgcagaggttattaaactgttcgaacagccgtgcccacggtcatgggcggatgcgaggtgtttcctgtagcgtagatttgtttgcctgtgctttgtgaaaaattgttgtggattgggaatcgttactagaatcagcctatgtggcagatggatgacctgagtggtcaagaaacgaatctgtgtgattcaggatgtctgcgggcatcatagacttggcttcccgagtggaagcggatcgttgtgttgttgggcagctggactctgggagttcgagaacatgaataaggctctaggagccgcttaatcaagtgaaatggctctgtgagccgagaagtaatgatctgacccgggaggtcggtacattacaaattgagttgttgaaaaacatctcttaaagtcgaatcgagacgcaagtcacttttcggcccaaacttagaaagaaataaatcacttagtggtttcaaaatggacttcaaacaaaagatttgcaaaacaaccttgcctctcttccaagcttgcatcaaacacctaaattcccgtgatttgctgagtacgaaagtactcacccttgctctatataaatatatatagttccttcgtcgtgaagttgaagatgaagtgaagtgaagaatagggtttcgtcctggtttccagccgtcgcctgtggtgttgggtgttagaccgttggttccgctgctgctgttgttgttggtgtttcctcgtgcgcgtcgtcggttgtattcttaggctattctgagctacaacctaagttaaggtaaataagtcttctttttatttttaaggattgcaatgattcatatttgtcaccgtgggtaccagcgctggactggtactgtgatcgcggtttcgtaggaagcggttcgcgccgtttttcctacgacatgctcctatcaggtgccgttgtacggcggtgccagatttgggtgtgacatgatttgatcgtgtaatcaataagaaataaaggcaaagaaaccgcggttaaatctataaatgatagccgatcggctaggtgccgatgacatatcatttatctttgagccgatgtcatatgtgaatcgatcggcagttgtaaatagacagtaaagaattaaatctattcgatcggctgtagatatttccaatatatagttcttatatcgatatatacttaaatcaagtgattgggatagatcggtcaccatgccgagacagtataaatcacctagatcgaaatatatattaataacagagctatatatgtttgtagcatagccaatcagacagatctagcatgtatcggctaatactccgatactactctatatcaggatattaaaataggtataatatatcaaacaaatgcctaatatacttagatacggcaatatcttgacataaagggcagatttaacatgtcaatgaagcatatagagcaaatatagttaaatcagataagatcggctgaaactctgatgctaccctaatcggcaaccagaaggcaggctagagattgagattctaatcacgacttataagatcaaactcaactgatggagctataagtatgaaaagaagggcaatatctagacaatcaagccattggaagtttcatagagtggtagataccttatataatctaagtcaacatcgatatctaacctagtcggctgccctctacagacagatgttagccgattatagattagatagcggtattgtaagatatatgataacttgacgaattacataaacgaggtcagagcatcgtaaagatggcagcactaatcccgagaacacaagtcgtcataacaagttttacctctttgttgaagatcgaaaacgatgcagctcaacccaaaagtaagaactcgtcgaaataaaactaaaacaaaagggtggcgatgcgccgagattgtattgaacgtatgtgttaaaagttacatagggctcgggtctatttatacccgagaattacaagatatgtccataacggacacgactactatctctaacaaactctaagataacataagtctttgctccagacttttgctcaatcgtatctctaaggagattacataaaacatcctaattaatagatataattgacttctgaggactctatccatatgcagcaatcaccttgaagcacctcaatcctacccgatatcatacatcaagctgcgttgccggaatcggctctatcggcttacctagtctgactcagacccagccgatcctaatcgtagccgatttggactccagccgattcctgctttgttttcgaactcgatctccgccttcgattttgcttcgatctaatcttctttcctgatgctgatgttaccaaattcggttgttaacactatgctattaatatatggtctcacatatcatacacatattgcgtcatgtagtccgtgttgcagctggctacagatctatagcttgctacttttctctcttaacttttatctcgttaaaatatgcttataagcaaaagttattatattttgggacggaggtagtaatagtctctagtccctccgttccaaaatataagcatttttagctatgaatctagataactatggccctgtttggatgcttcgggctattaaatagcactccgggatcttgctatttaggagtattaaacgtagattactgataaatcatattccataacccctaggctattttgtgagacgaatctaacgaggtatatttattcatgatttgctacagtgatgctacagtaatcatccgctaatcatagattaatatacctcgttagattcgtctcgcaaaatagcctaggggttatggaattgattatgtcagtaatctacgtttaatactcctaaatagcaagatcccggagtgctatttaatagcccgaaggatccaaacaaaatctatgtgtctaaattttatagctaaaagttgttatattttagaacggaggtagtaatagtctgctaatgtaactgctctaaggaatgaaagaaggatactgctgatctcctaatcgcacggtggtttctctctctagagctagagagagagtatgagtactgtactgtaatgtttctctctctagggctacaggtagcttaggttagggtgtggtagggtgaggaggggaatgggggacagcacccatctgtgaagtctgcagcgtggctgctgtgctcttctgccttttgttgctgctgtctctgaccgccagctttacggaaactcataaacaaagaagcctctctcccacaccgcccctgccctgccctgcccctgcgacgacgcacaccactgtgcacacatgtgtgtgtttcgtccgttcgattcaaaggcagcaaggctgaccaaaagcgagtcgcaaacgtaaaagaagacagcgagaagattgagtggtaggagtatgtgcgtactgcgcggcatgcagctaccaaccaggtgttggtgatggtgagagagtgaaaggggtgggagacgtaaagatgacgagccgacgcgagaggcgcagcttgccgcgttgcaggagaatggccaagtttaattagggcatgtttactttaatgttatttttaaccttatcaaattttggtaaagttatcaaaaagtggctatatttagtttactatcaaattttagagcatataagaaatcatgccaaaatttagtaaggttttttttttcatcaaagtaaacaaacccttagctccaaacttattctttaaatgttcaacttttctatcacattgaaactttcctccacacataaacttctaactctttcttcacatcgttctaatttcagctaaactttcaattttaacgtgaactaaacatacccagtgtactctctcacgcgctgcaggcttttcgccactgttgatatgtatatgcatgccattttgttccatgtgaaaaacctaaccagagacgaccatcattcaactcttccatgtaaactgctggttggttgggtggtttcatttcatttccatgcagaggcagagcgtgtgaatgaatgaatgaatgaatgaatcgatcgctttctcaacccgggcatcaccagtgcatttacgaggaggcatgtgttttgctggggaaacttcccagaatggcttgaacctgaactagcaaggttttaattgtcatatgctggatactgccatatgatatgctaccagcacaatgggtttacatattgtcttgtgagattagcagcatctgcgtgataaagaaaaggcagaaagcagcaaactgcaggcagaaccgcagaagggaatacgtacagtactgtatacctctggcttttcaggtttctctctgattttgtgcatattttaaactgttcctccaggtgaaagacgcaacaagttttactcccgtacagtagtagtggtacgactagtatttttcccctccccgacaccgatgtgatggctcagggctcataggctcgatggtgagaatgctgtttctttttcctgtaacaaaaaagaggaccaaatcttggcagtggccaaacgaacaaacaccagcatgggcattctctgcatccagatgtggcggccatgtcgccctagacgtctaggctaaacttttcatcatctccatttgaaacacttcacttccatctgagattctgtaatgtttcacttcacttcctatgcatatgcaaaaaaagaaagcaaactttcagcataggcagaagtaaattaaattatagctttaccatttgcatcaatgatagagaattattctcttacttaggcataatgatcaaaaggaaatgacgccgaaaaggtgctgtttttgcaaaacaaaagacgcacatgagcagagagatacgcgagctttcttccatccctgcagaggcgcacacacacaataattacagtacagacatgaaacgcagttgcacccccaacggtacttgattggtcaaagtagggagaaagggaggcatgcccactgacaccaacacaatgggcccatgggcctgcctgccatgtgggccagcaattggggctcagataagccaacccactggctcaatgatcaatggctaccagacagcacactcagaggagcagcaactactagtagtcctggagtatcgactctcttccttatgatgatgtgcttgacccatcagagataagagagaattattgggctctgttttggctttgcttttcttttcttatcatgctcttactaactgggattcaccggaaggttacctcctctcttccaaaataattttacttttcactcatcccacatgtaacaatacaaaataaaaaggattaaagaatacatctattttattaaatcccaatacaactattcagcactttatctactcccaataaaaatattacaatttttcataaacttcgatgcaatgattaccttaaaactaacttattttgggacaaataaaagaaactacaaataaaattattatgggacgaagaaagtagtagaactaagagtttttcttctaccagacaatcgtaggagtaatcagtactcctccccctatcttaagatataattcttccaatctagatgaggatgtgatataatttagtacaatgaatttgaatagaggatattcatttagatttattttactatattgtgtcacattcttactcaggttaaaatattttggacggaaatagtactacctctatcccataatgatagggcttttgactatgccgcttttaataaacatacaaaatttatcctagaacaactttatcatcagtctatatttcatctaattataatcatctctcatttaagttttacactattttcccctcaacccatctcttatttacttttactatctcaaaaactccttaaacctagtatttgagatgcttagggggtgttttgagagaggggctaaagtcccaaacacccccttactactagtagagtagtactactacattttaagagggaggtctccaatgcagctcgtttttgttttctcttttctgcagcagtgaggggaacagatagatggggctccacctccacaccaggagaagggaactaaggaggtggtgactgctgactgacgaaggcctctctttcggctgtgaacctgtgacactgcagagctctgcaggctgcatgcatggattgagacttgcagagcactctttcggatcaccccatggatccacaaaggtttctttcagtctttccctgtgtcctttgactatgtgccacgcattcatactgaaaaattgaacttactactcccatcaatttatcaattactccatccgtcccaaaataaataaaattaaaataaaatacaatattttctagtcggattcattctattagattatattgagacgaagacatgttcacttttaataccattttcaaccatactatctttttaaattaaagttgccaaaaaaaatctacgtttagtttgttgctagatttggtcaataaataataaatcctaccaaacttggtaagatttattttggctataatctaaacatgtccgaagggggtaatgtgtagcgtttgtcgttcttttaaaaggtaagaagtacatgcatggaaaatgcagtatgtttgggagtacaggtaggttacaacaaatctacttctacattctgttggaaatgcagccggtagtactttgtaggagaagtacacggggtacgtagaacgtttgtacttttgtcaccgcatgatgcgagcatgcctgaatgcatcatgaagcccatggcaaccacttactcctactacgaggggaaataacatttctattgccattaatattcctgcaaaacctgatcagcaaatgaataaccaaaacaaactcctcactcactcaactcactcactgatagcacatgttttgtcccccaaggcatgcaagctgggagtgtccgtccagagctcagaacagtgaagacgagctactacctcagctgaaggtcccttctctcccctacatgatgagtcaaagaagtggtcagattgcctggcctgccacagcctgcacagcttatgtaaggcttcccatctgattcacagatgcatggcatatgtgcagtgctgctccctgctggagtagacagctgccttctctctctctttctctctctgtgtcatctctgatgcgtctgcagcagcagcatgcagggacaggacaccccgctgcatgcatgcttcggcagcaggcaggcagtgtgctgcttgtcatgcgtacaggcaggcaggcaggcaggcaagcaggcggatggatggatgggcggagggagggagggacagtggcgtcttctcgtcagcgttccccagctttcgctgcggcgtcggcgttaaatgggagatgccccggtaggtggcggtggtggtggtggcgcggctgcatgcggagatgctgctgcaaaatggcgtcgatttgaccccacccacatgcacatgcgtgctcgcgtgcagcggcgccagagacgacagcgtacgtacgtactgggaggaggatattgtggagtgtagctagcgcggcagtttcaccggcgactgggtgtagacgtgtagctataggaatttgcaagttcacctttgctatttcaggcttggggtctctcgagctgttgtatttgtgttcatgcacccactggagatccaaagtttgcatccaaacttcagtccttttccatcacatcaacctgtcatacacacataatttttcagtcacatcatctccaattttaaccaaaatccaaactttcgctgaactaaacacagccaaaatacaacaatatgcactactgtttgtatttgtgttcatgctcccaccggagaaaatacgacaatatgcactactggatcaggggactcagagcaggagtagctacagaatactatttgggacgctgcaggtaggaaagcatattactgggaaggaaaagttgcaagagtctccaggaaggaaagaaggtaagagtagccttatcggcgaaggattcgatcatgagcaagcatggatggattgaagcagtgactgagcccagtggtggtggagttagtgcagtcagcagcttggggctagggaccaggcatcgtgcagcgggaattgtgtggatgcatagtggagcggggctctctagcttgccggcgacccaggagcagggaacatgcatccacccgatcagcgatcacgctttgattcggcagcgagaatagtctcgatcaccatgggggtttaatccggtggacacgccggccagcttaactatgtagcccaagctacctgcatgcatgcacgcagggaccatgcatgatgcatcatggccaagttggcacggaagtgaacagatgacgactctgctgatgcgatcccaaacacagaagatcctggtggtctccgctccgttcctcgtcctcctcctgcggcatctgcctaaaaagcttaaaaactccggcagcagcgtctttccgacggccgtggcgtggccagccaccgtacgtacactggtacacacgggggtgggggtgacgcagcgacgcgtcgtaccatggggcgacgttgtaggtagcggcaggcggcggcacatgcagcgagctagtagtagcggcgaggagggcggcagtgtgacgaccactggtcgaaggctttttccgtggtacgttgtggcaggcacattcactgcgctctgctgctgctgctgctaccgccccacgggcaaagcggagccctttcactccctgcgcacgcagcgactcacgcaggcacaccgcccctgtagcattcctcgcaaccacagtccacgtctaccgctgctttcggcttggtactgatgagtactactgcaccgaaacattgctcctagctgatgaaacaacaggctttaggctgtaataagccactgtttttagaagcgaaggcctgacgctcgacagtcaggtcttgcttgggcagttgggcttttgcctcgaaagtaatcaaaacttgagtgtactcctcatatcatccacagctcaaatctcttgatatgaagcaaaggtatattagccttgccaagctgcctcctcgtcaaactcttctttctatgcctcctcactttgataggcagataaaaaatgttaatagtggaatgctggtcaatgaagctcttcgggccggtttggtttgaggtctaaattggccttaccaatatttggcaatttcaaagtgtttagtgtctatttggtttgaagccaaattttgacatgcttaagaaaataggccatttcaatagttaacttaggctattttagcttcaatccaaacacaacttttgctttgccaaaattagccatgtcaaaatttaccaaaatttagcatcgacaaaaattagtaagaccaatttaggtcacaaactaaaccagcccttcgttcttcatccaggaagtaaaaaggaggtaaaactatgtcccacagctgtaactgatggctaagagccaaaaaaggagctgtaactgggatggctaagagcaagtttaatagtatagccaactactggctccaattcatctatatccaatctaatagctcattcatacaatagttacatactacactattaatacatggtcccacctatcatacacactgtgtcttggagtccgtgctacagctggctacaaatctatagcccgctgctcttctctctcctcatttatctgtttacagctggcttatagtctgctattattgtagctgctctaagagccaatgggtaaatgacgccgatatagtccaatatgcaaaggctataacgacgatctgtcagacaatttaaactccgccaacaagagacggcatcggaatatgcattgcttttaatgaatttatcatgctcatgtccactggccaggattggaccgtctgctgccacctgccatcaaacacaaggtctcgctcactcgctcccaaaatataaccacctaacactagattaaacatggaaaaatgcatgagcgtccagcataacaatatcctccgtcaagattcatgtcaagattccaaagctactggacataccgaactcttctctacactatgccatcactcaacagatcgaggttcaaagaacccgatcttcaaataacagtacgtatttttgtttccccctcatatacagattacattacagctgcaaaatgaacacttcagattacagacattttgcaacgcagaattaacatatttagtagtcactgttgaagggagagacctgggaggttttcctatgggacaactactacctacaaaatcttaaatggcaagctgtgtgcaacagccatgccaaattaatgtataactactagaacatcattttggctaattatccatatctggatctcaataatataccatttctccaacagtcatcggtggtttcgtccaaaccagccgtattcatttttatgggagccgtgccagtaccttaacatagccatgaactggactctttgtctggttcagtatggtttctttggaaccacatatgaacacccatacagtttggtaacccaacgttgagctgccaatgtaataaaaaggcagctcatcttttcaagatcaatatgtacagttgagatcgggatctaacactgtaatgcaaagagagagagagagagagagagagagagttaaaatgagcactagaataaatcatcatgcagtagacacctaaggatcgaaatatacttggctacatactccctccgtccgaaaatatagcaatcttggatcagatggggctcaacctatgcactatgaatctggacagaagacatgtccaaattcatagtactaggttgagtcaagtccggtcttaggttgctatattctgggacggatagagtatttcataaagtgttaatatcaaaggcaatgttatctcatggacatttgagcacggttttaacttgcggtaggtttcaactttcaagctgtaactgttggtagcttcactgtttcaaaaggagggaaaaatgtccgaaataagacaccatgctaatcggcttcactgtttcacaaggagggaaagatatccgaaataagacaccatgctattagatcagttgcacacaagatacataaaggcaaaattggtacctaggcactgcacttaattgcactgcacacctaataatcatgaattggttgctggactctgcaaatcatcaacatatgattttcttttaggactttccttcccccacacaatgatcaggagggtagcaaagtcaggtgcatcatagtgccagagaaagtgatttccattcgattctacatacaaatcactttagacttgtgcacaggaactaagtatagcagtaacattaacagttattgcctcagaaaatatccatgccagaattgccataacaaaaggagagaatgtaccttggcaaatcagctcactgaagatggttaaattcttaaaagagacttagtccttctgataaaaggagagaactaggtctgtatgtactgagaacaattgcgtgtccacaaagagctgccaacagaaaaagaaaagtccacatacattagtccatggaccagtatacaggccatgaaaagaacatggcattttgggtatcgacatggtctctgaaatacaattttgaccactaatttctactataatctatttgtaaaatccaacaaaattataacggtatgaaagtgatttttgagacatccataatgtgatttttcatgtatacagtttagtatttaaaacgattgatgtgcaaagttttgaaagtttgatatggtgcatgtccaaaaaagacgtactatctctgtcccaaaatagttgtcacaatagagtactgattgtcgaatcaatcacttctcattcaaatttctccctattctactctcaaccacccttccactcttacctatacaccatctaatgaggggcatcatagactttcttctcaaaccttaatatatgctaaacaaccaagaattacaattattttgggatggacatagtattcagtataggaagacttaaaatgctaagtgaagtatcctattcagtgttgtccaagtatattattacaatactttagtagcaaagaaacagaactagactatccgtacatgtataagctgtactatcaaaactcagaaattccattgaacacaagaagaaaagggaagactacagtttataccttcataaagggcctctcacgggtcgggaaagaaccgatgaagctctctcttaaaagcaaggaaacctgtgcaatacagaaaacaatcattagtaacttgtatgctacacttgtaaacatgctgacagaacattttgtctggtatctgcaccacataacagctagtttatttgtccacaaagaaaggggacacagaataaccagaacaaacactatattaacaacaaaccttgtcattgttggattgcacattagtaatcgtatgagatctcaagttggaacacagcgaatcaaggtaggatctaagcactgccaagaaacctttggcagcttccacctgcaatttgagaaaattgaatatccctcaaggctttgactaaatatgaaagctcatacagttcattaaccagtgaaaaaaatattgaaccaggaaaaaaaaatcagttcggaaaaaaaaatcggacttcaactaacagagaccatgttgcaacagcaaggataagcgtgccatgaaaccagtggagcacatttatggattctataacaattatatcagcaaaagagaaagaaatataagttcaacaatatcaggatgcatcctaagttgggaacagatcacgagatacaagataacatgaagaatcaaacaaattaagaaaatacctgggcatctgtacattcataaacgggcctctttcttgctagaaaactctctcccactagtctggaatggtatggacgcagggcagaaagcaactccttctgctgcgggagttgcgggacagaagtagacttgatctacatttcaagataaaaacatgtatcagcaaatagctggttgcatgactcacatcattcttttaccagtgatagcacggtattatgtgattttctattggaaattttgtaatagatagcagggaacatatagttttcatcacgaggtcccataataaaaagataagactcaaaaaacaagacttgctgatccatttacatgtattcacaattccgcaaataattgaatatccagcaaaagagtaaaattgttggaatgttaatgcaataacaggcacctgattcttgttggcatcaataaccacggcgttcactagcctggaatgtacatcggatgtcttgttctgcacaccaacctaaggaagataactgttattaatcctggatcagacagtccacacttaagggtttgtttggcactgcgctatgggctgaaatgccccctcgtttcccatgagcacacttcccaaactgctaaacggagcatttttagcaaaaaatttctatccaaaagattcttttaaaaaaatctaatagatccatttttcaagtttatattagttaatacttaattaatcatgcgctaatcacccgcttcgatttccatgcatgaactagctaattcaaaccccagtgtcaaacgcagcctaactcgattaacatttattttagacaattgaaataattggtggtgtataagtcacaatctactggaccaatgcccacatattcagcggtaaacgaatgtgaggtctataaatctaggtctcatcccaccctgttaaatgtacacactaacagcacctgtacaatcttatcctttctcacctttgcatttatcaagataaataaggtcaagagaactcactatgtatggaacaggtgcatcaagaaagtccatcatgtcgtttggcaagacctggaaacaaataatgtagaatatcagagcaaatacattgcttagctctgctcaaatctgattcatccaaagtcacaacgtcaacgtaccggtatgagtagactctgccactgatatgggcgtatcagaggtatgatggacaaaactgaagcagaaagcattccctggccattggaaatgatgaaaagttgacatgaaatgtaagtaaaaactcaataaatgctgaattcttgttattcatcagcaaagaaccaaccaaaggttctacacaagaactcgaaagaaaatattgtacatggtagggacataattgtataaattaacaaatctacttacctataaggttcaagcgttcctcttttaataacaaataaactcataaagaagaatcaaaagtgttgctagagctaaagcacatggctaaataacacgcggcaacgtatgttaatgatttgattgagtaacaactatgcatggtagttctagagttataacaggaattacttctgtgatgcccagataaagataagcaatagattaactgatcatcattgtaacaacaaaaatataaaatacgataatgccagaatttaaaagccttggaggcttaccaaattagaacaaacaataataatctgtttctccagcagtgctgcagcaaaaagtgtcattacctgtcaacagtatcatttcaaaatgagaaatacaggtaaatatcaggtagtactccaaagcaatttatagacagcttcaatttttgagccagcatgaataaagcacatgcacaaaggatgtggaacactagatcatccattacgtttcattaaaaaatctgatctagtgagatggatgggtcatagagacaggcatcagtttgtttcttattatggaatcattgtcaagtgtgagtaacaaacaagcaataatactaaaaggctaattagcccacagtgcaaagcagagacaatttcatgtcatcgaatgcagtaaagtgcaccacacattccatgcacagaatcaactgatttccgtcttgttctttcattaaaaactcactattaacatagttccaaaatcacatctggagtaagccagacaaaatggcactgctaaagtgttatcctattgacgtgattatcctaaagcattatcctattgacgtgattatcctaaagcgttatcctattgacgtgattatcctaaagcgttatcctattgacatgattatcctaaagcgttatcctaaagaaaaatcaagacagatacctcaatgatgcaaattggccacttgcaaatagttagcagttgagcatggaaaaaaatcagttcacaatgggtagcacttgtgtattttgaaagtatgacgacaatcttctataaatgacaccactaagcaactagtagtggtaaataattaattaggttctgcaaaggaaaataagtcatctcagcaatacgcgaagaatcttacatgctccaacctgaggcatccacaaatggatgccacagcccatgttgataaagcagtcgattcctcctcggcaaatagcgcattgcgcatctgaaaaggagtggacaaagcttagacatagtattcatgtatatacatagcaaatagcttatgacaccagagtggacaatgataaatgcataatattgcaacacatcagtatatctcacctcagccacctctaaacttgtatcacatgaccgcagatcaatagtagaaccagcaatatgaagaactgtttcacctggccggtgaaaccttagaggatgaaggtgatccaacgggtgaaaagtaagggatgaacccctggcaggacactgcagctgatagtactgagaaacaacttgcagagatccatatttttttgcctgaagaaaacaataagttaccaaatataccaacaaaaaagagagagacagatgagcaaaaatttgtgtcattttatgcaaatagcaccttagcccattgcgatatattgttgtggccaactaagtctccatgaccaattgatgatggctcctccaaatccgattcatggctatcgcttctgaaatttatgccttcagaaggagagtcctgggaactgcagtaaatagtgctaactactttattattttattcagctagtgatgcacaaaattaagaagtaacaagacgatttcaagtgagaatatcagaattcaagaaacataggaataggttatgtaaaataacatactagtgccttaattatgtggaggataacataccctggagataattcagaaccttcacaaaggcgagagcgcatgagaggtagaatagtatcattaacaaagatgtcaagctgttcatcgttcacatcatcctgtaaagaatagccacaattttctgtggtatcagattccttcaggataactggtacagaatccagttcatgaagctcaatcccagattgatcggcagttgtatcttctgataaacaattgtcaggcctttcaagagtatcacactgaggagctgttcctgttacaagatcatcctgtactacacattcctgttgaacttctttgcagtttaagtccaattggttatctctacattcagaactgctgtcagtgtcagacagctcctttgaacaaactcccacacttgattcagaggatttttccagatctactgcatgaccatcgaaatattgtttttctgttgcaagttcagttccttcgcagacaacatcatcctcacaggtttcctcaggtgataatgatgtaagcaagctaaccccatcagtgagccattcgagacgctcttccataagaatactgtttgtgaaagtcatatgcaaaagaagtggcatcaaggagaatatcaatattgcgtatagatctggatagcatgaaagacactcatacaacaatgtttaacaaagagcaaattgagcagagacaatcgcaggaactttggatgcaatctaaaatattatttatgccataaatagaaatcctgaacttacatccccatcctgagatcttgaagcattttgtgttcaagctcacaaggaaacaaattaaccattggatacacataataaagcagataattgactccaatgttaagttaaaagcattactagaaaactagaacactgtgccaattgtggaaaatataagggagcaagtgattgaattcatggttttaaaccccaaaccttcttagttgcttattctagtattcttgtctaagatatcgatgcttattctagttgctgtgatgtaaaaatgttacttgcagaagcaaaagaagcaacaaacttgtatatgttttccgaaactagcagcgcaattgaaaatgtaaaagctctttatggctaataaggaccaaaagcagccgatgaatattttttacgcaagaactagtgatcaaaattagaacatacaaatggtacacaaggatgaggcttccacttctgctgagtgcagaccggaaaggtggcaaagcaaaagactgccaaaaataatgaatatttacaattcagcaagataacaagcgataattgcgatcactataccgtacctctgtagcaccccaaagtgcagttcaaagaatgggagcctggaaaagatgcaatagcatcgcggtgtagttattacataacgactccggcgtggaaagacaggtttttcacttgtgagcatagaaaccagcttcgaaggtctctgtacaatctcttcaactaacacgcagcatccatatagtgtagagtcatcagcaacctgcagtctttcgataatcagcaacctattgaagtagagtgatatattggagaaagaaatacatttacctgtaaacggaacacgaaagactggttgctttctttaagttgctcctgaaatgggcaacttactatataagattatggataaaaaaaatcatgacacaggactatattacacaggctgtaaatccttagagagcatcaccattatatggtgttgaaaaagacaaaattagcacggagaaacagtcacctgtcctaggaggatttcattcagctcactgaatgagggggtccgttcaaccgcatggacctaatacaaacataaacataggtaaattgttttgagggtatacagtgcatgatctgacaaaactacagatggaggattggatgttaagcaatcaatgcatatgtgttttcattcagaagaaacaaagaatatcagctgtggttgcagcctgcagcaaaaacaagaaggtaaacactattagcagtatgtagcccaaatgtaacagacctgtacacctccaggaagacagaacgagaggatatccttgtacttgagtggtagaggcctctctggagggtatgcaaaaagaacctaaggagtaagcaggcaaaagtaatcagcaaaagtttcaagtgcatgaaagaagacacaaagcggatgaggtgagctataacctgaggttccaaatttgacaatgcatgaacttggtggtgattgttaccgaatatatttctcggtttctttacatcttcctcattgctccctagtgcaatgttttctagctcatggatatctgcctgaggagggagtccaacaatcacaatgctctcgaaaagatgtgatggttctctgatgcacctattaccctggtccagaaaagaattttgacagttttgagcaagaccagaacgggtacaaccacagaagaacagaaatgagaaatacaacgtcacactcttcaaagtactttccagaaacaactctacagcggcttgcatgctgaagcaaagtgactcgcaataatcatctatgaaaaacaaagtgtatataattctaaagtgtttgccacaatttaccagtcttattaacttaaaaaagctaggttacaacacagtggtatttaaattcatctgttgcactcaaataattactcggaaacatggtgaacacacataaaagtgtgcaagtaaatgagttgctctggtgcttatgaggtgttaggtatgaccgtatgaagtttgccacaatttaccgatcttaccagtttaaaaacgctaggcctttcaatggtgtggtatccaaatattattgggttctttttttttttttgaagtggagagagagcctctcccgtttccattaatagaaacgatagtagttcattacaagatataaactgaaagcagaacagcagaaaagataaagctgaactgactgctcacaaatggcgccatcccaccattttgatgcatcagcagcaacaacttttgcactttggccctacaaagtctaagaaagctgtaccaacaaagacaaaggtagacgagaaacaaagctaccctattgagttcttactgtacatggctattgcactggaataagtactcagaattcagaggcacttgtgaacaagtacataagaatataacaaaatggatatttttgttatgatgctcaggttatttcaaccattacagaacaaaggtaactgctatttataatctatagagtgtgaaactgtccagagatgactagtataaatgtaatcataactgttgagtaaaccttcctaaatagtttcaaataattcagcaaaatgctgataagtcaccactcactacacaagtacacatgatagatacatgagcaaggtgaaagaaccaaagtaaaactttcatgcaaatcaaactcaatgtgtgatagatcattgagcctgacaagcgatattaaatgagttctggtattttctataagtaaaactccaagacaaaaaatgttgatcaaaaaatacacatagttcgtgtaaatggaacaacatagacgttgaagcgactgttatcttgtcttgtgaccatgctatgacctgtataggttgtaatgggaaagaattaagactaacatccctaagatgaactgcaagtttgaatattatgcttgaaaaacaactgccaatgaagacacactattgaacaactagtgaaaaaaatagcatatttagctctgttttgtgcactactgtactctgtcatagcagttaaaggatacaggtcactcataaattaaagctctgaattaaagaccgaagttaatctgcaaaagtatgtccaccaacatatagattgaaaatgcgatacataccagcgactttagttggaacctggaccactggcgcttttgtgttgtgagaacctccgggttgtaagatccagacacttcaggtgacgttgaaaaccctttcaggatcttcgaaaattgttgttgcagcttctgcattgggctgccactctcttctctggaagagtacaccacagatggtcgtgttgactgtacagtggctgcagaagctgcagcaataaatgctctcgctacctcttcagttgtttgcatcaggtgtgatgtgttgaatttgagcccttcagatccatcgttcttgtccaccattctaaatgcttcctattcatgcaagcaaggagattgtcactccagtagtgtgattgagcatgcgcatatccgtcagacaacatcaggacacaggacacatatcatggaaatacgtagggtaacaaacaaaacttgagcattacaccatgatcatgatccagtggtagcatctatcgtacaagtaaatcatcttctcggctttgaaccacttaaattaaattcgacagaacctatggcctacacaacctacagtcctgggaacgtaaatttgtgaaatctacctcatacagaacaataaatcagcttgtacctcactctgatatccaaccagaagccacctaacagcaaaccgtgtgcactttacctacctaaaaagcggtccacttgaataatcatcgaacttttccaaaattaatcactgagtgcatggttgaatccaaaagggcaaaaggtgacaacaaatcgaacaataccacataatccgatactactatgatcgatttatatacttcgaaagtaagaaaatgcattatcagcgaccgaagcattctatattaaaaaaaaaactagcaaaatcgtacagagcaaccactcgatcttagtgttatgacctaaaattcgcgaaaataccacatccaacagactgtttgactactccaaatccatcatacaggcgacagtaacctcaaagtgccaaatcgatagggaaatcgcaccctccaaccagagtcagatgctctcagaatttaacagtagaaaacccatacccccactacggtcgacgaaacatccccgaaaagaatctcaaaacacacacacacacagagaaaaaaaataatagggaaaagcgctccgaatcggctcacctcacctgacgcggcggcggaggggagggctttgaagcttcaccccgcgaagatctcctcgcctcggctctcctctccccgctgcgcgcgcgcgcgccgccgccgccgtcgaaatggacccgccgaactagcaacgaatgggatggcggcctcctccccttcccctctcctcctcctcctcctcctctcctttttttttccccttcggatttgtggtttaatgcgtcgatccgttcgattaaaaccagaggcgattcgtcgcggaaaaaaaattaagtggcgtgatttggttcggcgcttgggctggactggacgaggggggaggagagattttgagaaggcgagtttttcgtggacgagtgggagtctgctggaactggggggcgatctgtctctctgctcgtggggcccgtgcaaaggagggtgcctgagttgacccgagccgtgtggccctccgtgtggccgggtgcctcgcttgccgctacgccatccgacgcgtggctgcttctggctggagccaacagggagtacgtttttttttcctttccgagggaaaaaatgcagtagaagtacacgacagcaggcatgcagaacaggcctttgtatgctcgcgctattaaatagctctatgaaatcttgctatttaggattattaaatatagattattgataaaaccgattctataatctctaggttattttgcgagacgaatctaataatatatattaatccatagttagcggttgattactgtagcatcactgtagcaaatcatggattaatatacctcgttaaatttgtctcgcaaaatagcttaggagttatggaatgggttttgtcggtaatctacatttaatactcttaaatagcaagattccggagggctatttaatagccctccggattcaaacagggcgtagtagaaagggagtgtttagaactttagatcaggctataaaggtttgacgtgtcatatcgcatattatatagagtttctcactgagtgttcgggcactaataaaagactaattacagactccgtcagtaaactgcgagatgaattattaagcctaattaattcatcattagcaaatatttactgtagtactacattaatggagcagttaggtttaaaagaattgtcttgcaaattagtcgtaatctgtacaattagttttttagattatatttaatacttcatgtagatatttaaacgttcgatgtgtcagtgtgtaaaaattttggcaaagatctaaaggcctaaatcaaacgttttcttttaagatgaataaatcaaacgttttgcaacaataattgtacggtttttaagctgtttagggataaatgatactaggacgacttaaaaaccagtggtactagtactcaggaagagtccaacaagtttagtctcggcaatcaactttttctttctctcaattaagttgttttgaatattgattcagtcgttttctgcttggttgctaccgagcattacaccctgtgttgtttttgtattttttggacaactagttgtggatatgctcgataagaatataagatactccaagctcatatcttcgggactttgtttattcttcagaccctttttactttgattggaaaatctctgctcctaaaaaattgcaagtaacaggagtgtgaccaatgaaactggtagagagatgagtatataggaatggtatcctcagatttatacgtgagtcacttaactgcatttgtgattacttcctccgttttaagttataaaactttatagtattacacatttgtatagatattaatgaatcttaatacattaatatatatatgaatattggtaatgttataaagttttataattaaaacggaggtagtaagtcggagtgtgtaaaaggcaagaagctgaggctcaaactccagaatccagatgtcaaagcctctagtagaacaattctgaaggtacgagcagtacgacacatgtacagtgatgacgttttaaagccggtatccatagccatcaatgaagtggttccaccgtttggcagcagttgaaaaaaaattatgtggacacattgtacctacctaagtactcttagggagcgttgcgttcgttctggtgagttagggtgagaaagcacatcgtagtccgcgcacacgctttctaaactattaaacgatgtgtttttggcaaaaaaaatttctataggaaagttgcttttaaaaattatattaatccatttttgaaatttaaaatggtttatactcaattaatcatgcgttaatggctcacctcgttttacgtatctttccaatcttctcaatcccctatccctcaaactcacccttaggctctgttcgttctggggagataggggagaatgagtctcgttttccgcgtgcacgcttttcaaactactaaacggtgtgttttttgcaaaaaaaatctatagaaaagttgcttttaaaaatcatattaattcatttttaaaatttaaaatagttaatactcaattaatcatgagctaatgactcacttcgttttgcgtatctttccaatcccctcctcaaacaaacccttagctatgcaaagtacagtaccattctttcgctcttccatttgtagctgtactctcgtgtttgcagaagttaaactcgctaccaagatttaaaaaaccacgtggttattacgtgtgatatccttttaaattttcgaaaccacgatataactcatgataactatgtggtttcgtggtaaccacacggtttccgtgataaccattaaaccttgagccgtgaggtgatggtaatctcgtccaaaatagtttggtaaaccctgcatgctacccttgttgattttaacgctttgctcctgcgagcaacgatttttgacgttaatgagtactatcaagctgaatactagctgatcatcccattgccgcataagatcagtgagtgctacagcgacacgaactcgcccgctgatctccatctttttctctgtctgggccacgctcaagcgtggcgagaaagccgcctgggcccattgctcggaaatcaatcaatcatttcatttcattgtgaactactccctccgtaaaaaaaaaacaaaccctaaatttctatgtccaactttaactgtccgtcttatatgaaaattttttataattcgtattttcattgatgtttgatgataaaacatgattaatattttatgtgtgacttgtctttttaatttttttttcataatttttttaaataagacggacggtcaaatgttgaacatggaaactatggcttgtctttttatttggacggagggagtaaggcatgatctagttcccaactttttcttcaaacttctaactttttcatcacatcaaaactttcctacacacaaatttttaacttttccgtcacatcgtttcaattttaatcaaacttacaattttggcgtgaactaaacgcacctgaacccatgccatgccacccctttcagctttaaccatggtttccaatgcagcattcagctctgccgtttacttttatacagcagaattttcgcagaaatttctctacctgaatacggctgtgttcagtgcagtgtaaagtttagattttggttgaaattagagatgatgtcactgaaaagttgtgtgtgtatgatagattgatgtgatgaaaaaggactgaagtttagatccaaactttaaatctaaacatagcctacctgaactttcgtagagtcttgagatcgggtcattgcgaaagtccatttgttgcattttggtctggaaattgttcggcgaaaaatctcggaatgcattggtggatatgtcaattgcatcagcccatgcctgcatggtggggagctggacatgggaattgtagcacgcaagaaaacgacgggtgattgagcagataggctgtgtgcactattctgaatttctgattccaattcctggtctggtagcatgccagcccagctctctgcattgctagcctttctcaggctcagaatctgaacttcgtttgatggaggatttgggtttactctgacggaacatcctgcagcttcaccaaagtaattaaggccgagtttagttccaaattttttcttcaaacttttaacttttttattacatcaaaactttcctacacacataagctttcaacttttccgtcacatcgtttcaatttcaaccaaacttctaattttgatacgaactaaacacaccataaataaaaaagttagaagtttgaaaaaaaaatttagaactaaacacagtctaaaacatgagatgaacaaaaccaaaggtgagggatgtatactctactagcattggcaagtgtgacgatgcataaagaaagaatgttcttccattacgtggtgcccatacacgtcgatgcaattaattccgtgatagatgaagaggatggagagatgacacgacctcgcgagcctaatccgaattggatagatttagtgatccggctttacgattgctatccaaatgagagagaaaaaaaatatttttagggggctttctttcctcttgaaaaggaccacatttctttatccacgagctgttagcatcagtgcatcacgccgtcgccaatgaaagaaagaaagagaaagggaggaaaggttagcatcatgattattgagaacctgtcatagctgtcaagcagagttgctgatcgatttgtagactcagataattatatgtcattttgggccctgccaatcagccgttgcctcatcaacagatcactagactgatgaagagtgccgcgtcatccttcgtctgatggcatcattagcccatatgctgctagatgcaagaactcgatcgaggacatgaacatttcgggcttgtttggtttgaatcaaatttttgccataccaaaatcttaatagtgccaaaaccttggtaagttttggtactattaaattaggtggtattgaatttgaactattatgacaaaaaattggtagcaaaccaaacatgtatttgctactattgaagtagccaaaaaattagtagggcaataagttggttgcaaaccaaacaggcccttccttgcatatatctaacacaattactatggatgtgtttagttcacaccaaactccaaacttttccatcacattatatcacatccaaaacttttctacttacattaactcctaactttttttccaaattaccaattttccccaaacttctccttaaacttcggaactaaacacagcctatatggcaaaggccacttgctgacagatctagcaaacgccacctgctctgctgcagaaccccttgctggtaggtaaacagagtgcaggttgtgcatagaaaaaactactagttccctctgtatgcaaaaatgtttgcacttaggccttgtttagttcctaacttcttttcttcaacaagtttttccgtcacattaaacttttctacacataaattttcaaattttccatcacatcgttttaattttttcaaacttacaattttaacgtggaactaaacacagtaaacacaatacacaactgactggcctggtgttggcctggtattaccttgcccgacttctatgtcagagacattgacattgatgctctaccaaaccagccaaattatcaaaagtatcaaacccttcctctttataagaagttgttgaatagctgacgcattcttcaccactagttgccggttgaacactggcgttgcttttatctgaacaatactagcacttccacttgcattgcataagaccccctgaccttgtgttgtctcttgtggcttcaggccttgaacgtccaacaacttcaggagggtaggagagccaaaaaaaacggtctgttgagtatcattggtgtctgactgaaataatgcgtaaatgcagtaggtgagatcatagtggatatggccggaccgccggacagttcgatggatacagaagagataggctccgtgagactttctgtttcgctagcagacaggagctgagcgactaaaccggggagtactgccaacaaaacgtaaggcagatagccagatatggaacttctggactaatctgatgcaaattttccattttttagtccacgactccacatatcatctgatagcaagggcttgttcagtttgctaccattttaaaccttaccaagttttgatattgccaaattttagtaaagttgtcaaaattttggcaaggttaacaaattttgacaagatttcatatgtactttctaaaatttagtaacaaactaaacgtagctaaaattttaactactttaataaaaaaaatatggttgaaaatgacatcaagttaaacaggccccaagtttgtgaatatgaagctaacagttgtactgagccactaaacacttctcgaggaagaaaagaaaaaaaagacagatgtgcaagaccagtttaatgcagtgttggcccatgagtcatgctgaccacaagggctcgtttcgatgggcctaaatgaggcccacttacatgtatgggctagacacgatgcctactcatactgaaccgatacatcatattatcgtggaataagtccattttacgttcatcatttcatcaaatttaaattgcacccgaaaccataatacctgaaatcttcgcaccctcaaattgtaaaaccaggttaaattacgtcctttagtattatagatggttggtttcactgacgtggtaagttgactcagtcccgtcctgactagatgtttacgtggcaaaaacaagagtggaccacatgtcatgcttactctcctcccctcttctctccccctcctctcttccctacaaaaaatggcctcggagacaactaggaaccgggtagcgaacgtcaacaagcatgaccacctcaatcccatacgtccacgtcggcctgaacacgccgcaatagcttcctcctccactctcgccaccttctcttcctatcgacgccagcaccctcctcctccgcgcacctcaatgatttgtgcaccgaacaccaacattgtgtgcccctcgtacgcaaccggcccacctcccccttctccacccactccgcggtggagaccgcttcatcttactcatttggctccatcctagccaccccctagtcattctcaatcttagctcgagagccataggggatgggaggtcaagcaggaactcctagtcatgacgatgccgaattgggagatatgtgcagtgagctcagagatgatgtagaaggtcgaggatggggcggtagagggtgcgggaatctatgccaacgatgaagctcagcctccccctccaacgacggacgggaaatgggatcaccagccgcctccctcgctgccaatcgctgaatggtgtgcgtggttgggaaaaagagaagaaaaaagtggacattgatatgtgggttcatatatattttttattttcttcttcccactcaccccatccgtcccaaaaaaaaatccaattatagctatgaatctggatatatgcgtgtccaggttcgtagctaggatttaccttttttctgagacagtagtacatgcagggctcatatgttttttaattactttttgctgactaggataccatgttagtgaaatcagccatccatattaccattagatctaatttaactcggtttgcaatttagagttaagattttgggtatgacgatttagagacgtgatttaaactcgatggaaaaatgagggacctgaagtggaccttttctattctcgtcgtaaaaagatgcccaaattcactcgattccgtcggccattggcaactaatcacctccaggctccagcccagcccaaatcgttctcctcctccagaataagcccatccgccgcgcggcatgcaactcgcgcaaaagaacaccggagagcgagagcaccgtgcacgacgccgatggccaacgttgcagaagatgccgctgggcgctggcctactagtacgcgctcagccgcacacgcacacgcccgaatgctcgatcggatcagtctcctgcctgcgggttgccatgtgcgcgcgtgtgcaatgcgctgcgctcccacggcgaagcccccacggagacgcgcaccggcgcaacaagcgaaaagatgggcaaacgcttggagcccatcttgctgccgcccagtgcccccacgaaccccatgcctcgttactgctcgtcgcgtcgccctgcttgcttgctactagtccgctgccgcttggccgtttcttgcttgcctcatggctcgtcggctcgtgatcgtacctgtgccgcgagacggcgagaccgcgtgtcacactgcctcgtggcttgccgtatgcgtaacgcaggtatgggcaggccaaagaaggaacagtcccattgtttaacatattcgaggaaaaggtaaaacgctacttgaaaaataatgtcaataaaatttttatatactttgtttttaataatttagaagtaaagactgaaaaataaactataatgaaaataatataaaatttaactttaaatttaaatttaaggttgattttattttctgataagtataaacgtaaacgaaaagataaggctgtaagtagttcatcagcccatcatcccatcgaaaagccgctgcagagtttagcagctcagcatgctttgaacctcttgctacttctctttcatcgcatcctctctgggctgtttggacggcgtagaagttttgtctgtggagcgaggcagctataattaacagtggatcatcggattcagattagtcaatactcggctactcgcaggtactgtacgcaccaggcgacgttgttaatggggttgttacttgttagtgtacttctttctgtgaattaaaggagatctgaccggaatcttgaccacgtacatgctgatgagttcattcgtaatccgtttaattctacgaggacatttgactgtacaacaagtattttgtgcgtctgtactggacagtttgtagaccgggatctagttgctgtacttgatgggacaagaggtcgctcacgtagatactgcagatcgtgtagaacatctgtagtctgtagtcttcagttgaactgcgtgcatgcatgttgcacgatattgtagtatgtacctattcatctataacatctataacgcatcaaatcatctgtttctataggacttctttactgtacacagcaagtagaaacgatgaagttcttcagcctggggccggaaaaaacaagaggccaagagggcaacgcgcgacctcgtggtttctctttcaaagttgagcttttcaattcaaatggagttgataggagtgcgtgttagaggacacggtttaggccatcatcgagggtgaattgacaaacaatatttaaccagcaaaacacagctcgaaagcttatatatcacgccccctgtccaggatgcagcctttcgagcttcagctttgaggatcatacggctcaagaatcgccatcattaacccgtggaagatttgcacggcgagtcttttaaagatcgtggagctgttaagcagtgcaagcgttttcgcaatcaaacctgctgatcaaaaggctgcctcattcgttggccaaagaagcatgacggctcgttagtgccttcacatcccgtcctttttgtgtttttgttgttgttcacttacgtagtactccctccgtattttaatgtatgatgtcattaactttttaatcaacgtttgaccattcgttttatttaatttttttgtgtaaatataaaaatatttatatcatgcttaaagaatatttgatgatgaatcaagtcacaataaaataaatgataattacataaattttttaaataagacgaatggtcagacgttgaataaaaagtcaacggcgtcatatatattaaaatatagaggtaatactatttatacatgtgtctctgattgctggtagaatactactacttgatactcaaagagcaagattaatctttggctagtatcacctttgcagttgcaggctacatcagccgtggtgttaaaacagcaaaataatgtagtactatatttatcctaaaatatatctatcttagatgagacttgttctagactgctacttttgaaacggatatagtagcattttattttacatagcgggtacattggcctttatttcaacagaaactataacaacgtaacataactatatatgtttgcatcacacaagtccacagaatcgatgcccagtttcagaatgccaatgtaccaactgcttgtgcatagggaaacaaatgaatctgtttgttcgtagtcgtagacgcatcggcggcaaatggtgcagacctgcgagagtttcttcttttctgttttcatttccggccacacggtgtgccacaggagttgtgccgcggagaatcaccgattcgctttcggcccaggccgaagggatctgctgcgcttgtgctcaagatggatgggattttgtcagagaggtggacgtggaatgggccctgcgctgcagctgggccttgttaccattggcctgtataattaatgccacctttcggaagcatttgagggctggcccacaatgcatgatatactagattttttttgcacgtagtactgaactttattttatgcacacaaatcgctctagattttgagatttttggcagccgaaatcccattggaagaatattcttgtaatgaaaaaaacataattgagctaacttaaaagagtaattatttttataaaaaattatcaatttactatatattaaaaaaatacggcaattgtatatatactccctccttccctaaatgtttgacgctattgactttttttaaatatgtttgaccattcgtattattcaaaaacttttgtgaaatatgtaaaactatatgtatacataaaagtatatctaacaataaatcaaatgataggaaaagaattaataattacttaaattttttgaataaaacgaacggtcaaacatatttaaaaaagtcaacggcgtcaaatattttgggatgcagggagtactttttatcagaaaactatagctttattttgacaggttctagactctctcatcatatacacatgaaatacttatatcggtgtaagtttaccccacatattgtgcacccgtagtagataaaattataattttgtaaaaaatcaattgttattgttgttgttatgtgaaaatacccatctaaagttgtgacaaatgatttggaaaaataaagttttaacataataattgcacgaaatggttgatgcattgaccattatatcactaagcaagtcatcctcaaaattcaaaacgattgcaatacagcaaagcgagcatagctcaactgatttgattcattacggtgcgtagaacccatacatttgggttgaagtgctaaacttggcacgtgtactcacatttacgattaattactcttttagcaatatgcgatgtactgcttgacataagaacgcttgtggtgactttatcaatcctatgatatatcagcccaatatacaaaggtgtctatatgggtaatatggcaacccaatctatcatagggtacaaggccctgatgtgtgcgcgggtgtatttagagaggcactatatggtgactttataaatcttaagatacgccaacaaaatatatagaggtgtgttcattgtggtgaatgtggtgagtttatcaatatctcatgggatagggtatataggtgtgtacggtgactttatcaatctcaagatgtgcaacccaatatatagatgtactcatagagttagattacgtgtcatctgtttataggagagtgtgtgacttcggtaatactaagatatgcagatatggtctttataggtgctcatagaggtaaaatgcgcatgcatattcatagagctgagtatgtgcatttgtttatatatgtgagtgtgacttcgataatatcaagatgcgtcaatccattcgttgtagttgatcataaagataaagcgtgcgcgtttgtatgtctactcaggagcggagctagagtatatgaggggaacccgataagaatttttttaagctatatatcacctattttcactatgtgtgcactcttctcaatacaaacttagatatctaaatcatcttaaactctatctaaaatagagtaaaataagcaaatgatatattctccatttcgttatagctctaccctgtacctactctgtataccatgttgagaaagaaaaagagatgccaatgtaagcggattaaaactccacattttcagcgaagtggatgtaaaacccagaagatccaaacatgccagaaagggggaacaagtacagtcgtaccataacaaccacgagagcgaaagttgcagtcatccacatggacgtgccccctgttcgtcacccacaagacacaccaccaccaccatcaccttcacgccaaagcctccctctcccatctctccctctctctccctcccctgcgcccatagctcgcagctttgcagcagccaagccaagaagccaactcaacccatcagaacggcagaaaccccagccgcggcgttggttaaaccacagcaaagcgtcgttgatgcccccgcgcggacgcctcgcctcggcgccatgacgacgaccaccaccactcgcctcctcctcgctgccattctcctcgcggtggccgccgccgacgatgacggtgggtggccgcgtgccgttcccttttgctctgctcgcctgcgtgcgttggcgagggagggagggagagggaaggatgatggattatagtggggagggagggggttgggtttgggtggcttcgtgttttggtgtttttttagtgctgcgagtgcgcgccttttggtctttgtttatgtcttgctccctattggccggcgccgcctaagaatggcctaatactagattaatcccagcctcctgttcgtagcatctcttcttctgttcttcttccctatccaggggacagttgctgtactttttttttgttttgttttttaaatgcggctttatttttgaactatttttttttctgttttgtttcgttcatggataaggtttctatattgttcttggagatcaaatgctcatttctgaaatgccgccgctgtttgtggaagtttagggagtgttttttttttgtgtggggtttttggttatcgagttttggatccggaaatggttttaaattattttggaagttattctccgattcctcctccgaaaccagattcctgtttcctcgcgatgtttggtacttcgattctgctgtttatcaatctggtttgctcttgcgtgttttccaggacaaacgctactggagatcaagaagtccttccgcaatgtggacaacgtgctgtacgattgggccggcgatggcgcgccgcggcgctactgctcgtggcgcggcgtgctctgcgacaacgtcaccttcgccgtcgcggcgctgtgagtttcctgccaacctattgcttggcttgcctggctgcagtgcccgtggttactgacgtgttttcttgcggtggaatgcagcaacctctcggggctcaatcttgggggcgaaatctccccggccatcgggaatctgaaaagcgtcgagtcgatgtacggtggcacgttgtctcctggaatgaaatgtttctttcattcagctgcttaattagtgtgctcaactcgttctccctgtttgtttgattacatatatgcagcgacttgaagtcgaatgaactttctgggcagatccctgatgagattggcgattgcacgtcgcttaaaactctgtaagtgagattcagttttggttcgcagtgttgttttgaggatgtagaacagtagaagtaatgcgtgccgcaaccctcccctgttcttttattcaagggacctgtcctctaacaatctaggaggagatataccattttccatatctaagctgaagcaccttgagaacttgtaagatttaccctgctgaaacttggtggaggagaagtattttgcagcatttctttcatcgtaagcactgctgttacttgaatatataggatcttgaagaacaaccagctggtggggatgatcccgtcgacactctctcagctaccaaatttgaagattttgtaagttgcggctgaactgttctgagggcttaatttggatcaattctaatgtgatatatgccccagggacttggctcaaaacaagctaaatggtgagattccgaggttaatctactggaatgaggttcttcagtacttgtgagtactaagtagtcgatgattctgttccctactttaaaaaacttcttttttttgtttcagtacttaaactgcagacaatatgtaggagctattagtgctaatcagatttagtttgtgtaaattataggcggttgaacatatgtaatgtagggcaaatagttcggtaagatcatattgtcatatccaattgtgctaatctgattttcatatgacaggggattacggagcaataatttagaaggaagcctctctcctgagatgtgccagttgactggcctgtggtacttgtgagtgtattgcttccttttgtttattattagctctacatgtttgttttctttgttcctttcacaaacttgattttgtttgacttagtgatgtgaagaacaatagcttaacgggtataataccagatactattgggaactgtacgagctttcaggtcttgtatgtacataccttctactccttctgaattatgtgtccccctttctttgacatgtcaatcattcctgaccttatggtatttttagggatctgtcttacaaccggctcacgggagaaatcccattcaacattggcttcctacaagtggctacattgtatgtggtagtcattttactaacaaaaagagtatccaacctgtcgtaattaatgaaaccaactacttgaactgctatgcactattttgtaccaggtctttgcaagggaacaatttctctggccctattccatcagtaattggccttatgcaggcgctcgcagtgctgtaagtccaatgataattgatgtgcttgtcttaatttatgggctgagagtgagaggtattaccatagcccttgaatgcaagttttcacctgtaccttctatttgttgatacagtgatctgagtttcaaccaattgtctgggccaataccatcaatacttggcaacttaacatacactgagaaactgtaagcctgcccttgtgtgtgtgttttcctagcctttgagaaatataatattcttaattatgtcaagaagttaacatcatagtatcttgttttcttaggtacctccaaggcaataggctaactggatcaataccacccgagcttggtaatatgtcgacacttcattacttgtaagcctctacctttaaaattttgttgcttcttgattgttaattgattagcgcactaccctcttttgagacaatatctggtttcagagaactgaatgacaatcagctgaccgggttcattccgcctgagcttggaaagttgacgggcttatttgatctgtataactctactcatcctttatcaattgatgcttacctggaatgctaaatcagtcagtggaccatatcatttgtttttcacaggaacctggcaaacaacaaccttgaaggaccaatccctgataatataagctcatgcatgaatctcattagcttgtaagtttcatttgttctcctgaagttctatatcctctccgatggcagggcacttaactttagctttgtaacagcaatgcttatggcaataaattaaatgggaccgttccacgttcattgcacaaacttgagagtataacttatttgtaagtgttattggttttaggtgatttttcttcaagcctgctataaatttagttctgttcatagtgtctaatgatttttgttttcatcctaacttctaggaatctatcatcaaactatcttagtggagccattcccattgaactagcaaaaatgaaaaacttggacacattgtaagtaccagaagttaatctgcaattgcttttgaataagtgattctcatgatatgacgtgtttgctggatatatttgaagggacttatcctgtaacatggttgctggtccaattccctcggcaattgggagcttagagcatcttttgagactgtaagttctataatattactccttgttataaaaaaataaaataaaatacttgtatcatgtcatgacagcattctcttattcctaaagaaattttagcaataataatttggttggatacatccctgctgagtttggaaacttgaggagtatcatggagatgtaagtaccttctcacctaaatgcgttgtctgctctgtacctttgggagtaatgcagattcctcttcctctgttttagtgatttgtctagtaatcaccttggtggtttgattccacaagaggttggcatgctgcaaaacctgatattgctgtaagtctatgttttaccctctatcctataaagtagtattgcatggtttcaaaaggctgtttgcattggactgcatattaatttgagtattctgtttctcattactgcatattgatttacgtgaatttttttttgtcttttttcagaaaactggaaagtaataatataactggggatgtttcttcacttattaactgcttcagtctcaatgtcttgtaagttatacacttgaaaagcaatatgaaatgatttcacacaattttttttggccatgaacctgtaagcttcatactgatagtgtgttactgcagaaacgtatcatacaacaacctggctggcattgtaccaacagacaataatttttcacgattttcaccggacaggtattttccttggggattaatcgatcgcttgaaaaagaactcgtaatacttaggcatctcaggcctcatcaataatctgatctttaattcagcttcttgggtaatcctggactctgtggctattggcttggttcttcgtgctactccaccagtcatgtgcagagatgtcagtaaaatgttacagctgttgcgttgctccgaagtgtaacttcacactgataaactttctaattttatatcctggatttttatgcagcctctgtctcaaggtctgcaattcttgggattgctgtagctgggcttgttatcctgctgatgatcctagctgctgcttgctggccacactgggcacaagttcccaaagatgtgtctttatgtaaaccaggtgatgcatctgcagaggtcccagtccattgattttacccatcaatttcggtagctgtttggcaagtgtcctctcgtcacactcaaccttgcaaatgatctattacatgtctcagactattgcatatgttcgccctctacttgatagatgcatttggttgttaacagagtgatattattattttcctgtgatagatatccatgcactaccatcaagtaatgttcctccaaagcttgtaatccttcacatgaacatggcattccttgtgtacgaagatataatgaggatgactgaaaatttgagcgagaagtacattatcgggtatggggcatcaagcacagtgtacaaatgtgtactgaagaactgcaagccggttgcaataaaaaaattgtatgctcactacccacagagcctgaaggaattcgagactgagcttgagactgttggaagtatcaagcaccggaatcttgtcagccttcaagggtattccctatcacctgctgggaatcttctcttctacgactacttggaaaatggcagtctctgggatgttttacatggtaagtgaattttacatggcaaacaaatacataggaactgtaagcagaatagttggtatttagaacgattgttcttctggtttgtatagccgttgcctgttcatctgtcaacaagcaccacctgatcactttcatatcaacttgtttgatggtttaatattatttggattaggatattttcatggaacataaacagctgataagatttctgcaactatagcctaattagcaatttctttattattttagcaggctcatccaagaagcaaaaactagattgggaggctaggctccggattgctcttggtgcggcacaaggtctggcttatcttcatcatgactgcaacccacggataattcatagggatgtgaagtcgaagaatatccttctagacaaggactatgaagcacatcttgccgactttggtattgccaagagcttgtgcacctcaaagacacacacatcaacctatgtgatgggtactataggctacattgaccctgagtacgcatgcacatcccgcctcaacgagaaatcggatgtctacagctatggcattgtcctcctggagctacttacaggcaaaaagccagtcgataatgagtgcaatctccatcacttggtaactatttttccattcgcttgctactgtttatttgaaaacttgttcctttccttcaccatatactcttgcatttgaggttcaataagtgcacaatcatgggcattatcaggtctgtgttccttcaaggggaccacgcatgaatcctaccatgtgagtagatctatatacactgtggcggacctggtagtgtgtgattcattgtatggctggtgaaagctctatcataacttgccagtgtcccataaagcctgccatatttgtcccccgccttcaatcatgtgggtgaacatttacaggcaacacacacctgtcaaaaactgtagctaactatgactgtactagttattttgatcactgacatgctggtaacttatcggaagaatttaccctgtcaatcctgaacatctctttttgaaagaaaacggcaaaaggtgaattaaaatttgtatttctaccagcccacaggtccagtacggaatagtgcaactgtaaacagtcgattttagcgatgaacttcctggtttgcatgaatgctgtttatgctcattggttgcttctctgcagatcctatccaaagccgcagacaacacggtcatggagatggtcgacccagacatcgccgatacgtgcaaagatcttggcgaggtcaagaaggtgttccagttggcgctcctttgcagcaagaggcagccttctgatcgaccgacgatgcacgaggtcgtgcgtgtcctggactgcctcgtctaccccgacccgccctcaaagccggcactgccaccggcattgccacagtcgtccacggttccgagctatgtcaacgagtacgtgagcctacgaggcggcagcacgctctcctgtgaaaattcgtcgagcgcgtcagatgcggagctcttcctgaagttcggcgaggtgatatcacagaacacagagtagagtgactatctgaatatcctgatggctttgtgctttgtggcgttggcgttctagctaagttaccagcttttgtgtccttcctggaataagaagggacaccgacgaagggctggctattcgctgctgtaaatatgctgtcttctggtttgttaggccttcggaaagctatttggccttcctgttttgatcagtttttcttcttatcattattagttagtggggtttggatgaggtgaactgtattaaggcctcctgggagtatgaattttgtaagcacgggtcagttaaaaatatcgcagtgatcgggaaaaatccgcctcttataaaattggttttgttggataatcgcggatttttcagtacagtaaacgatgttaagaaccgctggcttgtaaagctgggagcctgggacatcccagaggcaaaaatgggtgctggtaatgatcatccgtgtggatgcatagtctgctcgatcagaatgctgtttataggtctcaggaatcattctcggtgataggctgtgttgcagagctttgtccagcgctgtcgatgtatggcacagtttatgtcactgtgattcgctggtgactagtactagtaacagtaacagtactagtaagggcctgtttggcacagctccagctccaactctacccctcctggagctggagctcagccaaaaagtttcagctccaccaaaaactgagagtagagttgggtggagctctctcacaaaatatactagagttgtagagctgggtttaggcagctccacaactccactccagactcaactcctggagttatatttaggagttggagctgtaccaaacaggccctaagagtagttagttaatggtcagtgacccactttttttttttgctgtgttcaatactctccctctcatcctgccatttgtttcagtattgaagtgtgtttgagtagaaggagactgaggagattgaaaagatacgcaaaacgaggtgagccattagctcatgattaattaagtattaactattttaaattttaaaaatggattaatatgatttttaaagcaactttcttatagatttttttttacaaaaaacacatcgtttagtagtttaaaaagcgtgcgcaccgaaaaggagactcaatctcccctatcactctgaatgaacgaggccgaatggctacccggccatgtctatcacaattcacaagtagtagggggcatggagtacaaatttactgccctttgtagtacaaatttactgccctttgtagggcccctctccccctgacggatgattgatggtatagcaagcgatgtcattcaagcacggctccatgccatggggccaaaaaaaagccagccaggcgcggcgagctcctcgtgatatgcggggctcgtggagtaatggcgctgcgcgcgcggcgcgaacgcaaatgggatgccctttccgttcccgtccggtttagtacatgctgccgcggccgcgaccgcgacgcaacacgccctgcggtgcggggtcggcgccgcgacgcgctcggatgggatgcggcttttgacagggcccgtggcccttcttcttcgtccgtccccttctcctgggccggaagaaggcccatcacaggacatcagtgtgcctctgctggttgggctgatgcggaacttttgttgggccaggaccgcaggacaccggtaagggtctgttcggcgtccctggttcccgaccgacgcacagaaaacgcagtcttaattaagtattagctaatttttttaaaaaaatagattagtttgtttttttaagcaactttcgtacagaaattttttcacaaaaaacactgtttagccgtttgaaaaatgtgagcatggaaaacaagtgagaggagttgggaaaaaggggtgccaaacaggcaaacacagcctgttgtgttcttaccctatttctcaaacccacctcttttgttttccgcgcgcacgcttttcaaactactaaatgatatgatttatgaaaataaaaagaaaactttatatatgaaagttattttaaaaaatcatactaatctatttttaaaaatataataattaatatttaattaatcatgcaataatatcagctttgttttttcgtccggggaacccatcctcacgaaaacactcaaaacagcctagtagtaacgtggtgtgccgtgtaccattgattggaccggagagtatcggacacgacccatgttacgtactagtatgttcggtgtagaggacgagagatcacctcagcaatttttcctaagccttctggacctctgtgcaaatagtaactcattacgacatcatccttgttcggtgttgaaggccatcatccggctgacggttcgtcggcggcggcggcagtatgtggaggcggggaaggggtctggcggcagggaaggaggagtccggttgcgggcgcgccgtcgacggcgagaacaactgtgggcggtggccttggccgaatcgctgaagggacaatgctgttgaccgacgacgatccttcttgtgcggattggtggtgtgggtttggacaaagaatcgcgggcgaaagctttgccgagccatttggctggctgacaacggcaacgccgtttggcgtcgttcccatccttataggcgttgttttagcatacccctttcctttccctatcatattctccgggtgaaaaccttgcttcggttacgaacgagcggtggcggcgatccacgtcgcatcctccttgggagcaccgctttggagaaacctctttgtgcaaagatattgtcattggtctatgcattggcttcgaacttcagtcttaggccttgacgaggccttctagctccacattttgttttgcttttctcagtttggatcatctcttctcttgtttggtgtgttcaacttgtcttgaagaactatattctcttctggagtggatctttataataattagttatagttctttttatcaaatgtcgggatattatatttcattatctaaaaaattacgacatcatcaatccattcgtccacgcttcacacggtagtatggtactcgtagtcgtaggctcgtagtacgcacatggtttcagaggggaaaaaaataaaggaacaattgctgaaaagaacagtttttgttaccgtggagaggacggttcccagaactccacggaaaatacagggagttacccgcaagtgaagaaaacgaaaggcgtagccagaaaagaaaaggaaggaaaaaaaaaggttttccttggcgtgcacagcttctccaaaaaaaaactgtccctcccctgcacggctgcacattgaacgcaaagctcgcgacaccaatcgcacgtgccacgtggcgggcatcttgaacggtgggacccgatgtcagtggcaggatggcagtctcctcgtcctacgtggcctcgcccgctcgtgggacgaccaaccgtctttaagaaattggtctcaagggcaagacggtaaacttcgtgactggtactggtagtagagaaattaattaactgtcgtatttcgaaaacctcaagagcacactgggcatcgtgacttggagcgaaacccggcgggtttggtgggtccggttcttcctttgaacgcacttgggccgtcggatcaaagtggtcgtgttaggaccgacggttagggacaggggcgtgctgttttcgtgcagaaaaagggtaatcctaggttttataattctggagttttgcagggtttatttgcctggtccatagtttgtgatcttttcatctaggagtatataggatttaattggttttttccgtgtttaattttcatccaaatctattcacgttccatcggactaatttttagcaaagtgtttgtttatgagttgcactattggacttcacctctagctcgagttgaatttacatcctagctacgctgggacgagcccaacctagttgatataacctatagcgaatccacgttaaaagatactactacatccgtttcaaattataagactttctaacattgcacatattcgtatagatgttaatgaatctaggcacacactacaacaaaaacctcgtatagaggcacttttgtagaggcgttttgcaaattgcttccaaaattagaagttttatagcgtagagacactttatagaggcactttaaaaattgcctagaaaacttttactctagagacatttttagatcagtttgttagattttatctcgtagaggcattctttcggcactataaaatacgtctaatatgtaaaggcattttgttgatacattttaaactatgtagagacactttttagaatgataatgtgtactaaaggactaaatataagtaactaaaggaacaagcatataagtaatgacatggagttgagttggttagtgtattgaagattaaaatgatttaacgaagagattatgagttcaagacttgtcaaaagcaaggaaactattttattctcttttttggactggttttatatttttgcggtacaatttaatgtctctagaaaatgcatctaccatcttatagacattttataaaatgtctattcgtttgtagagacaattcaccataagacacttattagacattttttaaaatgcctctacattgttgtaaaggcatttaataagtgactctacagtactagaaaaatgtctctacaaagcatttttcttgtagtgacatatatgtctatattcattaacatatatataaatgtgggcaatactagaaaatcttataatatgaaacggaggaagtacgagctaaattagctactcaagtgtccaaaatagacaattttgatctgacaatattatttgggtaggcttttgaaacaaggtgaaacaatggaaaatttggagttatttatgcaaatttgctttgatacattgtagtgcatgaagctcgttcaaccaggttttcctgttctcgtgtatctaggccatgagggaagcacattttggtagaattatgagaattttgttgtacatatatagctcttgatacgatgctcaattcaacaatatgttttcagttattgtactgatttcgtgaggatttcttatgctatattaagttgttcaagtttagtaatataaaagtgccatttcgttgtataaataaactgggttacaacaataattcatgatgatgtccaactattcctgattctccaataggcggtccctctggcatcctcaaatattagttcaataaaactcaaaatctctctgagggtgcaaagatggtggacttttacaaggagatggagaatgcgataatccgtggttgtttgaatgagccagaggaggccgtaatggtgaggttggtgagatatctcaaaggtttggattattgtatttgaatgcatcgttgaatttaagtctcacaacactgttattagttgctataagaaaatcaccaatggatatagtcgtgccattaaaaaaatggacccttagctactggtactacatgatctggtccaagaagctaaagatattttggttgcgttaaaaacatatttcaagaccaatttaagcacaacaagttatatatttaatagcgaggcaaaactggtagctcgctaagtttgcatggggaatgtcttagttctctgttatttttctgcatgtgattttcgtgccgagcgttctgcatactaagcttcttaatttgaagttcgtgttgatgataaaactcctccgggattagatggaaattgagttgtagggaaattctttgtggtactctgaatgccaaaaactaataagaagaccttatgttacaaactagctctagcttatactcatataaaagggaaaccaccatgtgtccatgttactctaaacatatcaaagtcccttgttgtaaacgatttcttgatgcctctgacctcaactagtgaatatagaacagatcagggacctaagtcagagaaagcagcccatgtggccatgcattcaaagtttcaagttggccagatcggcaaaatttcaacggacccgccaccctcgtccgcgcctgcagcgccccgccgtccccggccaccatagccgtcgccgtctcgtacgcccatcccaccccttctcccgcgcccatcccaccccttcctccgcagccgccgccttcgtccgcgttctccgtggctgccgtcgtcgccgccgccgtctccctcgcccccggccgcagccgtgcgttggctgggacactgccggactgccccgtcctcacatggaagaaaaaaaagctgaaagggaaggatgggagcaagaaagggaatagagggatggtgggcggacaaaataaaaaaatatttatgttgcagtaattataatatgtctattatatcagttggctataatgtttatagagggatggtgggcgcacaaattaaaaaaaatatttatgttgcagtaagtataatatgtctattgtatcagttgactataatgcttactacagatgatgtgtccatctattgtagccgatagctggctatgttattgttattgatctcgctcttaccgatcaaccgatgggtccacgtgatttctcccccacacccagaaaaagacgcctctgccctcctggccccacgcgccccacgccaccttgatactcgcgggcccaccactgccacgcgggcggaaatgacgccttcacccctcgaccgttcaaattccgttgccacgtcggcgtgaggattttgatttttgcaatcaccaccccgcgcggcgcaaacatttcgcccctcgcggccacgttttactttccttttttttttggccattagaaaaagtgcacgtgagaagaagcgccaagccacagccaaaatttcggccatgagtcgacaactccaagcagcggccgccgcctcgctctaaccggagtcccccactctctcggtctgccaccgccgcgcgggccaccggcggcgcgccaacccgccgcgcgcgcgcgtctctcgtgctcggctccgccgccgggggggaacccggcgggggctagggtttcggcgagatgagctaccggaaggggttgaaggtgtgggtggaggagaaaggggaggggtgggtggaggcggaggtggtggaggtgaaggaccgggccgtcttcgtgctcacaagccagcggaagaaggtgcggcaatccccctcattccgtgcggtttaagtttgtgttgtactgtttgggatttttcgtgggggcggggtgtgagcagagacagggcgttccatatgagtttgcttcgagtattattcgagacgattgggacagaggcttgttttgttattagtttgatcatgggttgacatcagtgaactgaggcagttcaaaattctactaatacagtatatattttttgagttgctctggtgtaaactttgcgcgtcagagtacagggagaaacaactgattcgaaatggtggaagttgttgttacagatgtttaatttgaatctatcgctaatttacacaacaaattcgacctggttctggtggggcaccagttcgctaaaggggagtatttgaagtgtaaatggtagcattcctggggtactttaatttggattaaaattttgaaatcctttgccagttggttttagattttgtcagcttgtttgtaattttgcagaaccagtttgaagcttcagtcagagtacttctatatagttgtatgaacctgtaacttcacttgtgctctgcaatttacctggattgtatgagccgtgaaacataaatgcattgacatcaataactgaggacgattatcaacattttttttgtttacttggaaatcgctgtgctattagttaaaatttaactagttttagatgtatctgtattatgctatcctttttggtttgcaatgcactgctttaccaggattagtctcccttcggctgttgattttgtagttgtcctggcattctttataattttgtatggcaggtggaaatttgttttatcaatgaattctgatccactctgtttacacccaatggtctatttgggttctgcacttgatttctggatttcacgccgtcctcggtgaaaacattgaagtaatttcatgttgcaaccaaattatctatacttaataaaagagagtagtgttggtggttctgccaccacccctaccaccaactcccaacttttctttacaaaaatggacgtgtggtgctagagggcccagatgtcaaccactcccaccaagtcctttaccttgtgtgagaaagaaaaaagtacagtgtgggaccaaaaggtccacatgcgagtaacaaatatatacagcaatcaagagatgataataataggttaatgataattttttaattaattaatacaacagtaaaacacatgtcaatattctgcttgctctttgtactttgttaggctgtaggccgtaatctataggaggagaggacattgggatttgggtgagtctgtatgtactttgtgggctggaactcttgaattttccaagcatgtcattttttttctttttgttctttataagacgatagatcctgtttcaaccaattaaaaacaattcttttcaacaaggactttattttgctattttcaatatccgttgcaacacacgggcatttgtctagtgttgatataaccagtatttatttctgtacagaaaaaaatgaatttatagtttttttaaacataattattaacaatttatttgtttttactattaaaatttaatgtagttagtttattcttcctcttctggttttcagattacagttttggcagagaagttgctgcctagggacacagatgaagatctaggtggggggcatgtcgatgacatgaccaaactaacttatcttaatgaaccaggtgttctatacaatttgaagagaagatatgcattgaatgagatatatgtaagttgttcactggctctgttgtttttatttgtcgagtgacttgtctacaatgaaaacatattttgttctgtgaatcatcgactcgttgtcggaatttctttgtaaagatacacttcacttgcaattctctatttatcataatttgtgaccatcaacatactatatgtgccagtgttactttctcataagacaagttcactttggctgtccctatgattagacttattaatgatgattttctttcaacatgtgttgtcttagtaaatacatcttcttttgttttgctgctagcttctctttgtgacagccttttcatttttcttcttgagatagacatacactggaagcatcttgattgctgttaatccattcacgaggcttcctcacctgtacaatgagtacatgatggagcaatacaagggtgtccggctaggggagttgagtccacatgtttttgcagtggctgatgcatcatacaggtttggattacattttgattcagtttaagtgcccttagcctctgtttgcatgtacaatctgttttcatgacatttattgagttaatgtagggctatggtgaatgattcccggagccagtcaatcctggttagtggtgaaagtggtgctggcaagactgagacaacgaagcttatcatgcagtatcttacgtacgttggtggtagagctgccattgacgatcgaactgttgaacagcaggttcttgaagtaagttttacctcctgttttcttccactataataaatggatactaagagttgtgcatattttagtcgtcgaaaatatttctggttggtacttttcaaggcattttctcataactcataagtcttttgtttcttcttactagtctaaccctcttctggaggcatttggcaatgcaaaaacagttagaaatgacaactcaaggtgagtatcactcataaggtgacttgggaaatgttgttacaattatatgcaatagttagggatatattcctcaacagtacacatggttctccctctggcccaaaatatggcaacttctagcgttcaaaacttgtcccagaatatattaacttctacacctactctctcatctcaaccaatcacaaccatttctcattgagtttttccacctatttcctcaattaatcacaaccatcccccatttaattccacctcctttgggacggagggagtataaacgatatttcccagaatatactatggctttaccaattcataggactcaacctttctcaatgttttctttgcatagtcttaatttacaacactttttggttgcagccggtttggcaaatttgttgagatacaatttgatgcaaatggtagaatatctggagctgctattaggacctatcttttggaaaggtcccgtgttgtgcagattaatgatcctgaaagaaattttcattgcttttatcagttatgtgcgtctggaaaggtacctctaccaaccattgctattccatatttggctcactattatgtgcataattgtgtgagttccattactgcacggtttgattatgggctatctgtgaagtcagcattgaatgttgaagaatatgcttagagttaaattatactgataccctgttggcccgttccaatgtagacctcattcatttcgcccatttgagcagttattggttcagctgggatgtgattacgatgacacccatttctgttatataacttataagaatttgggcctgcaatttattactgaaattagttttattgtcaaaatattttgcatatcagagaagaaattgtgaaagatgtattcattgctgcaagacaataatatatccatttgaacttagttttaaagacaagcactaattgtttttaattgctgttaatgagattatcgtaatccacctcattatcaaagccttagttaagcatggagaacatagtattctagaggttgtataatctgtttcaattcagtctattctatctaattgtacagttgattccatgcagttctgagttttttttttttggttttggttttgaattttgcatatgtttgttcatgtaggatgcagaactgtacaagcttggtcacccaaggagtttccattacttgaataaaagtaagacatatgaattggaaggaacaaataatgaagacgagtactggaagacgaaaagggcaatggatattgtcggaattagcagaaatgatcaggtttctacagaatgtgaacatacttagatgttacatggaaaaagaatacctaaagaaaaccagtgcatattatgcatacttttccttttcttatcccagaaatgaatgtgtatattgtactttgttcaggatgctatatttcggatactggcagccattcttcatcttggcaacattgagttttctcctggaaaggaaattgattcttcaaaaattaaggatccaacatcaaattttcaccttcgaatggcagccaaactattcatgtatgaattttatttacatatatgattgtgacccctttttccgctcatcgtcctcatttatccataacaatgactcaaaaattgtatcaagttccaaactcttgattcttgaagcgtttagtttttaatgctccagggcattgaggttatggacgtagatgatttgacctttgatttcttacagacgtgtcacaagaaaagaatacactttccaccctatgttaatgacttactgtaaatgtggattacaacctatggttgataataataaaaaatgacatgtttacgctcctatacatgctatatgcatatgtggatattataattgaatctttttagatattttatttgagtttgtcttgatgaattttgattgcctgattagcaaagtttacaattttgaactgtccgcatttactgttttgacatgcatttctggaaacgggtcatggaataaccaccaaattaagtgagcatgttgataatgtactttaaggataatgcatgcatggataatatcttgttatgcctaaaatgtccttggtcactatgaatcatatattttccatgtagcagaaattatttaatgctctgggaacggaagtagctttccacagctttatttgttccttatcgcttcattttttctatttgaattaggtgtgatccagatctgttgatctcaactctatgtacccgctccattaacactctcgaaggagcaattataaaagcattggactgttctgcagcagcagctaatcgtgatgctctagcaaagactgtatatgcaagactatttgactggtattttcacatgccttcttttttcaaggatactgtgcatttttgtaagttaacattctttaattgtttccaggcttgtcgagaatattaacaaatctattggtcaagatgttgattccaaagtacaaattggtgtcttggatatttatggttttgagagctttaaaaacaacaggtaattaagtattctgtcatttagtttaactcactcactgcaattttatagcattccataatttagtttaactcactcactgcaattttattatatttgatttgtgaatatactattatcaaataaaaggtgtcatgttttatgtcagcatttctgttcacaatgcaccaatttacagtaattttgtgcctttttttcttgcttggttaggctggccttttaaatgtccacaagccgacaagctatttagtatgttgaaattactgtttgtgctgccaactaggcaaaattgtgggaaaagtatgggatgtttaactgctgcattttcgtctgtttcccttttcctgatgaatcatcctttatttattgctgcagttttgagcagttctgcatcaacttcgccaatgaaaagcttcagcaacatttcaatgaggtatagtgcatcatttgctctttaatggaaacacaatattaatttgtacttaaatatttatgtaacttttgtttcttatcattaaatactgcaaatctgtttcttcagcatgtattcaagatggagcaggaggagtacaaaagcgaaaaaatcgattggagctacattgaatttattgataatcaagatgttttggatttgatcgaaaaggttgtcttggcgaacttatttaccaagttcaatatggacaaatcactttatgcttagtaatttgttttaatattgtaatagctaccttcttttttttttctctgtatcaacttgtttcttcgtatgccattttatattggtcagattgccaacttgcatttgcatataatgacacctttacaatttagttacttatgtcttagagctggtattatgtttccctttgtgctagtgttggtggaattagttactgatgacattagctgtagttgttgagtgtttgacacgttcgtccattactagcaccaacctgaccacagtactagcatgccacatcccgctaaagcgttatcacatattgtcatcttttatagtattataccgggttctaagcacacaacaatgatgttaaagcttttgcgatgtattagaagaaacttcagctaggcttgacagatcttatttattcatgccattactcctaacagttcaaacttccataattgaataactagaaacacatagacttgaatgaccagaacaaacattcaagatggcttggattgtagaatgcattaatgcatacaactgttgcacttgcaaaatgtccgcaagcccaaagagccaaaacagcacgttggtgatttcaatataattatgcgatgatactattttgtaaaaatcttgacaaaatatgcttatcgtggcaaacataatttgcttctgcaagctttaatatctactgcatcgaaagtgtccggtgcggtaactataaaatttatggttattagtgttcagattatatctatgttatgtttgggactggtgcatgcttgtgtgagacagtttgctgtgcagtaatttttgattggtgtcgcttttgaaatgctattttgctgttggaccagcacttataacatatttttggcagcccaatgctaattcaattgtatgtacttgcagaaaccgattggaattattgcactgctggatgaagcttggtaaatcgcaatttttatttttgctggaaaacagctgtttttattaacaaatagataaccattctaatatatgttttttattttccagtatgttcccaaaatctactcatgagaccttcgcaacaaagatgttcagaaatttctcttctcatcataggcttgagaagacaaaattctcagagacagattttgttatctcccattatgctgggaaggtatgttaagtaattttaattattttttcctgtatcaggtatcaacaataacaaagtcgaccttttgcaggtgacgtatcaaacagaatcgtttctggagaagaatcgagattatattgttgcagagcactgcaatcttttatcttcatcaagatgccctttagtttctggactttttggttcattaccagaagaatctttgagatcgtcatacaagttctcatcagttgcttccagatttaaggtatcagcaaaaatttctttgcttcttggtctttgaaatttgtctgcttacatggtttatttggtcacatgtgccataagatattatttactctagaaaataatgtggttaaatgcatctacttccaaattatgatctaggtagtgatgaatagtgtggcagatgtaaggaaaggaacaaaaagaaaaatctctctccactatcccacctttgcaagggattttcatgtaaaggggattgaacttgttagaagctatttttgttgtatcatagcaatattttgcatgtgtttttcctccaaatattgctgtttccttaaaaataaaaaaaattacagtacatatgctcattgttgatttatataggctgatcttcacttttggaaattatatgtttccttgaattccatttgcagttgcagcacatgcagaagtttgaaccgtaattgtactagctttgattgttttattcatttcctttcattcctgtataatggttgtaattaaggcactgacttgctatattttcatttctcattgattgccttggattgtattgaaaccataacatataaccttcctaactgcggtattatattcattctctctgaagcaacaacttcaagccctcatggaaaccctcaactcgacagagcctcactacgtacgctgcgtgaagcctaactctgttaatcggcctcagatgtttgaaaatcagagtgtcctgcatcaactgcgctgtggagtaagaacatacgccttaaacattaaacacaaaagcaatagtatctgtttcttctccataaatctcttgagaagcacatctgcccatacatcacgtcatcacctcttgagcagcacatctgccttaaacattaaacctcagtttgctgttggcagtatggcactatgaatgtcgaaatgctaatgttcattgtgggtgcttcaagttatacctttgtgcaatagatgagtaaagctttttttggtcctatgccaactttcccaattcattgtgcaacagatgagcaattcctttgttaattgttggcactagcggatgatttgttggccatatgccaacttacccaattcattgtcttggttcatgctgtactgtttggacaggaagctatcatgtgacttgagtaggctatagtcacatgcaatccacgcttttgtgatcatgtatatggagccacattcataaaatcacttaataagatgtttactctttcgtaactgtatattggtattatacatcgtggtatgcttttgctttattgaactatctctagcaatacaccagaaaactccttaaattgtgtgactatttatctcaagctattcatcacttttgaagttttaattccatttgttgcttcatgcatgaactggtcaatgttccttgaagattgtaacttggtcatttgtcagggtgttttagaggctgttcgcatcagtcttgctggctatcctaccagaagaacttacgctgaatttgttgaccggtttggcgttctagttcccgagttgatgcttggaaggtatgcaatttatacttcattaagttaattttgagtttgtgcttcacattgtaagttgcaatggcaactttcttcttttctttttacggttttggcgatcttaattacagctgcaaatcattccatttgttgttggtgcagtctatagctgattcatgttccatctgttttggcctaaacagttagtaggtttgttagatctgatataaatgttctccaacaaacaacacttttttgctcaacatcgtggagctgatatctcttgtttgtacagcaacttgtatgtgtgttaccgataatgatattttagccattcatggtgctactttgatccagcattcccctcatcaattagagtaggccaaaccaaccaatggatttttatggcattttatgtaatcccgttattagttaatgggttcagcgctagcctagcagtttgaattaacatacacaattctggagcaactcaaacacacaatatcttttcaaatggttgccaactttttgcctattcgatgctaaattcctacatttactaccctctttcctatcctggaatggcaatctgactataagctttaaattgttaggttttgcgtgaaagtttggagggaatttatcaagggccattgggaaaaaggagctgcttatttgtttgtttttgattgcattaccttatgtgatgttatgtttaactgtgcagttatgatgagagggcattgacaaagggaattcttgaaaagatgaagcttgaaaattttcaagtaatctactcaacagattttatattactgtcattccctaatatttcttgtttatataaagagtaaatttcacaaaactacatgttttatggttcaagttgtagaaaaccacacacattttgatacttagcacttaagtacatatattttggtagtttagtttcacaaaaccacactatcgatgaatggattcacccgtgagatgacgtggttattccatctaggatgaggacgtggcatcctattaatttcgtgcgatggctggtaataggatgtcatgtcctcgtcctaggtgaaacagccacgtcatctcgcgggtgaatctattcatcgaagtgtggttttgtgaaactacacaaccaaaatgtatgtacttaagttccaagtgtcaaagtgtgtgtggttttctgcaacttggaccacaaaacgtgtagttttgtgaaatttactctataaagagtaatgcctgattccagtagtgatttttgtacacacatttttgttctgtttccaattgaagtgattgatagttgctgtcttgtacttttttatgtttatactgttcagtgtagaaaaactgactataatttattgatggtttaacactttgctttacttaatagcttggtagcactaaggttttccttagagctggtcaaatcgcaatattagatatgcgtcgtgctgaagttttggagaatgctgcacgccacattcaaggtcgtttcagaacattcattacacgcaaagagtttgttaaaacaagggaggcttcaatttctatacaagcatattgcagaggtaaaatttctgttgctttgtcaccttatttcctccatgaattctgatatattgctgctttcagtgctaaattgctgctacattctggttgctaattttaatgactttgcaggctgtttggcaaggaagatgtatatggtgaaaagagaaacggcggctgctataattgttcagaagtatgtccggagatggcggcttcatcggacttaccagcaagctcattcagcagctcttcttattcagtcctgtattcgaggatttatcgctcgccgttatttctcagttatcagagagcagaaagctgctttggtgatacaggtgtgtccctcctcttaagtttcaacttggttatctggaaacagtgctaggatagtaaataaataatttttaagctctcttttgaagtcataagcatgttccttaatttgttgttgagctgttggctaaggtaagtctagactaattagaatattagcttcatagcttggcatggaaggttatattgtattgtgatgccatcaattgtttatacgagaaaaaaactgactcatatggttgagttttcaacactgatttctgttggcaattgcagtcattgtggagaaaacggaaggttataattcttttccaacaatacaggcaagccactgtgaaaattcagtgtgcttggagacagaaacttgcaagaagagaactaaggagactcaaaatggtaaattctttgtgctattcgatatattatcttttggcgattttcaagccgtactgcaaaactaaaatggaccattgcctgttttagttttttttggtttttctacctcaaacactaccgtattactattacttgttattctttcttcctccacatgctcatgagggatacatgtttctgtgtacttgaaatgatctggtccaattttccttccaagttactctgatctgctccctttgtgtcatctggcaggttttattatcctgtttacagactagttttgtttctagcctgttattttcatgcattgtgaatactcttaggcttagttcatttctatgtatagaggttagctactacctcgttatttgtgagcacgcttcccaaactgctaaacgttgtggtttttgtaaaaactttctatatgcatttcttttataaaatcaaataaacccaattttcaagtttttaagagttaatactcaattaaccatctgctaatggcccgcctcgttttacttgcaagtgaaaagctgtcccaaaccgttcattcgaacatagccttatacttggtttatgttataggctgcaaacgaagcaggtgcactgcgtgaggcgaagaataaacttgagaaaaagttggatgaccttactctgagactaactctagaaaggcgactgcgtgtaagtgttgtctatcattttttacctttgtgttctatttgttaattagtacttaataagatttgctgttgaggggagaccacacatgtatatattttactaatatgcttgttcctaacagtattatgacacttatatctgtcatttggtatttaatgcttccataccattgtcacatcatgagattaacctaaatgtttcagaaactgattctgtgaaaaaaaatttcatgtttaataataatcataataatgtatttcgcctcatggggcatgaactttaaaatgtaggctgctggtgaggaagcaaagtcagtagaaatattaaagcgcgacaaaatgatagaatcattaagtgccgaatgtgctgcagccaagtcagatgctcaaagtgaacatgacaaaaatcggctactccagaggcaattggatgattcgttgagagagataactatgttgcagggtagcaagattatgacagcagaagcagaaaaggagaactccaatctgaaggttcaaaggctttccttgtcattttaatcgcaatgatgcttggttaactacattttcagttattctctgctgttttttttacacctttaattgcatctctcttatttaatgatttttccattgtctaattgctgtacttctaatgtgataaagttaccacaatcatttttttatttagttttaccattagttttcattgctgctgtaatttgctgttagcaatatgcttctgtgtttctcttaattgtactttggctgaaattattctatattactctgtacagaacttagttgagtcattatcaaagaggaattcgtcactggaatatgaactcacctcagctcgtaaaggtagtgatgatacgatgaagaaattgaaagatgttgagggaaaatgcaaccatctccagcaaaatttggacaagtatgttttccctttcatttattaaaccatagagtgctagaaaaatatgtatagtattctaaggtttattgctgctcgtttgtattgggatgcaaagcatctaacagctactggtttgctaattttagattgcaggagaaacttacaaacttggaaaatgaaaatcatgttcttaggcaaaaggcattaaacatgtctccgttgaacaatatgtccatggctacaaaggcttttcctcaggttcttttctttgctctttattaattgcttcagctatctgtttgttgctgttaatatttgatctagcatttaagttcttttattgatactcatatttgggacactgggtactgctctagtttgcatctcttcttaaatagtttactgacatgctgcttgaatgcagaaattcgctacaccgattgggcttccaaacggcgagcagaagcacggatatgtaagcctattcttttgatcgacgtacagaactgctatagattcgtctgacatattggatctcaatttttgaattgtaggaaacaccaccagcagcaaaatatctcgcttcacttccacagagtttaactggatcaaggagaaccaggatgcctgttgaaaggcaggaggtaaattccacatcatatttttcatttgttaatttttgcttgttctagctctgttgataccaccttagataagatggcaaataatttgttctggacgatgtgacattattcaacaaaatttcttatgcatcttggtgatgattttgtgtcatgcaggaaaatcatgaaatcttattacgatgcataaaggaaaatctaggattcaaggatggtaaaccagtcgccgcatgcatcatctacagttgccttttacactggcgtgcttttgaatctgagaggactgctatttttgatcatgtcattgaagccataaataatgttctcaaggtaaacttacttcagactcatctattttgctgtttgtgctaaatgtttatttgcggatgtcaaataatcatggaagttctcctgttcttactccagggggaagaggctgacggtagattaccttattggttgtccaatacctctgcattgctatgccttctgcagaagaatttacggtcaaatggattatttgctacaccatccggccggtctggtggacctctagggataggtgacaagatagtgcaagtaaggaaccctgaaaattatggatcattttcttaccagtactattgaattatgctcagtgtgctgatatccatatgaagtaatattttgaaagcaatgtcctagtttaactctacattattttatcatgtctgtatattttttggacatgacctggctattgacccagtcaacaactcaacgtattgggtcactggttgaagctgttggtcactgatggggcccctggtttcattttagcggcaaaaacaatagcatgacggtgcttagtaaggtcttaaatagcttattcggttcaactggaataagtagtagctaccttagttggttaccaggcagatgcagcacacatttttggaatctttaagctggtggagctagccagcagttgtattagtctatgccgtcagttacgccaaaactacctggttttaacataggtctttggatttgccacttcaaagtggccatcaatcagatttggtctggttggactgtcatggtgaaagtgctggttctcctcctccctcctttctgacaggccactctgctgttctggggcagatctggtaaatcatgtgtacctgtagaggatctatacgcttcccataatgggggaaatggaaacatcatggcatcatgctcttcaagtattcttaatttgcacaactgtataagcccagtaacatgttttgctggtatagaaatttgttgtgcaatttttattttccttttttttcgaaaattcgggtacgataaaattattgtttccctctgttactgaaatggctcctgttttgtttcttgcagacactcagatctccttcgaagcttatgggacgcattgatactcttggacaagtggatgctcggtatccagccatattattcaaacagcaactaactgcatgtgttgaaaagatttttgggcaactcagggataatctgaaaaaggaaatatcaccacttcttagtgtctgcattcaggtacttatccactttaaaatctggacgacaaatagatacattggaaacctagatatgtcagtacaccggctcccatctgaatattttcatgcaggctccaaaatcatcacgtgcacagcctggaaaagcatccaaaccacctggggttggtgcccaaccaccatcaaactcccattgggacaatattgtcaattttctggacttgcttatgtccacgttgcatgcaaattatgtgagcattttcttaagctttttttcttcatcagtggatttaaaggctcttggggtgaatcattcttttttattattatttttttttgctgcaggtgccatcattctttatacgtaaacttatcactcagctattctcttttataaatatacagctttttaacaggtaatttcctcaatttttaaatttatccttgttacatttacatacaagcaaacaaaacagtttgcacatggtaaccaatcgatgttattgaatgggtagttattccttggatgatataattatgtcttcattagttttgcaaatagcgtgatcattgcaccttttatttatgatataagcaaagggcctttttgacagtgaactgatggaattctgttggttaaaagttataataggagatggtggtagaattactttgggaaaaatcggagatggtggtagaattactttgggaaaaatcattactgtattatgtttgagataaagttataggtaaaaataaaatgatgaaatcatatggtttgtaatgatattaacagtcctgttcccattgttccatcagccttcttcttcggcgcgaatgctgtactttctccaatggggaatatgtcaaagccgggctgtcattgctggagaaatggatttctgatgccacggatgaggtaggtgtttgcattctgcttgtgaagttgttttgcactctgagaatggactatgagaaggcctgataaaattgttagcttatcccactatatttgttcccagtttgcttatataccttgtgttttaggaacttaggagcaagcaacattattatacattttatcggtgctctgactttttcacattgctttactagtttattatccttgtactttcagtttgcaggaacatcttggcatgagctaaattatatcagacaagctgttggttttttggtaatttcttgtgcatgctgcatttgtttccatgtttctgtgcttcttttgtatgcctgccgaacatctcactaattgcataacacaggtcatacatcaaaaaaggaagaagacgcttgaggagattaggcaagatctttgcccggtaagacttgctgcatgtatgacctccgatttgtgcatatccattatttatgccatacctcaactagttattttctgctcttgttctttgtagaacttgagtgtacgccaaatatacaggatatgctcaatgtactgggacgacaaatacaatacccaaggaatatcgaatgaggtaatcacttttggattggaggctttccattttttggggattcactatgcttttttgttctgagaatttcgggatctggcaggttgtttctgcaatgagggaggaagtaaacaaatatactcagaatctcgtatcaaattcctttttattagatgatgatttaaggtatgcgtgatttcttggttaaaattttagacagcagaatcagcctttttgtgtatgtaaatcactactatccttattgcagaacatgatttactatctgttaatttgcccttgtatgtgatgctttctttcagtataccgttctctacagaggatttgtcaatggccatccctgctatagattatgcagatgtagaatttccagaatcgcttcatcactatccatcagtacagctcctagtcaagcatcatgatccacagcctgtctaatagtatggttggggttgccttgaagattcgtttatttttgttcccagtttttagtggggtttcatcttttgaactgttgtatggttgttaggcttgtagtcttaagtttatccggggtgaaaaggttgtaacagaaatggtaggatgtcgtttcaaagcaacaattgttgctcggtgaaaattaaacaatcgtggaccctggttgtccaccagtcctatcttcagatgtacatagtgttgtagagacagttaagcatttgctatgaaaaatatccatgttctgtagcgttagttttctactcgtgatctgatgtttggtgcaatgtttggcaaaaacataactacctttgggctcgtcaaaacaaaaggagaataggaaaaaaaacgcaattagtatacctctgccattacccgattagtggtacctgcatcttaaaatttaagcttttctggctatggagtagtcaacactaacatattaggattatttgataactgttataacggttataaaaagacttgcaatgggttttaaggagcgagtgcgctgatgtatctgtggcaaaatctgtcgtaggtaatgtgaaatgtacgtgaaagtgttgggaaataacgggaattgtttgtattcagaaatatccagggaagacaatcccttaaattgtgcgtttttttctgactaatgtagaaatgttcatcgatggacatgtagtattatgcgggaaaactgatatgcatacgactcaattgtttaactcacgtacaactgaatttgatcagcggttgtaaacagttacagtgtatatgaacatgctctccttatataattgcatatctctagttatatatgagtagtggtgaaatcgggtcgggttcggtcggatctcactcttcccatatccgaacccacattttataatcggaatcgggttggatacggatagtatcgaatacggatacaagcacggataatatcgggcacaaatatgagacgaatacgtaccaagacggatacgaccactatcggttacgaatatcttttcggatatcaagtcaaagcaacgatcatctatactatatagataatagctatatattcaaccaaccccatataaccataatgcgactatattattagggcttaagatgtacgggcaatacgacaatgaacaattgatttttaactggaaaaattgaaagtttggttgaaattggaacgatgtgatggaaaatttgaaagtttgtgtgtagccgtgtaagaaagttttgatgtgatggaaaaattgaaagtttgaagaaaaaatttggaactaaactcggcctgacatgtgatgagctgctaacttcctgttcctgaagagatgaggatcggctctggcagcaaaggcatgtagcggcggtggccgcggctcagcggacgcagcaggtggcgcaccggtggcgctcgtagtctcggcatcattgctcaatgggattagtgaacagtaattagtatttttggttattgggttgttaggcatggtttactggttgatggtggtcattgtactagtgggccttttggccactagtgctttattgggctagacatgttatctaggtattatccggatatttaaccgggtaaaacccatatttttgctggataactcgtatccgtcggataccgtcctcccaaacccgatctcatatccgatagaaaatacccgtattcaaacccgctacccgtaaaaacttccgggtacccgaatttttgacccgaaattgtctcgaaataatacggtcaggcgggcaggcgggaaatacccgccccgttttcacccctatatatgagttgtataactggatcgtacttatagcagtagaactgaagtttagttcttttcaattgaatggctgcttttgactgaaccctcttttcatttttcacatttattattttccgggattcagcggtacaagctgaaaacaaagggaaaaaaagaacaccattttcctcaagaaaacaaaaggcaatattacattttttgctcttgggatcgaaaatagcatcaccaagaaaaagaatcaacgaacatgttactgcacctcctgcactttgcatccaccgtagaaatatgttaccactattatgtacacttgaaacgatctcgaacaatacacgctcacacgcgcgcacacacgcagtaacaggcaaattcacgccctgccgcggtcgcactttgcatccaccgttgaaatcttgagctagccgcccctgtccctgctctgcctcggcgagccggacacggagctcgcgtaccggtgctcccccttccgcatcgcgccctccgcgtgcaccgccgacgccacgtacctcctcttcgccttggccgccgccgccacctcctcctcgccgtcctcacccgcggccgcggccgccttcttcccgtcgtccttggcagcaacaacaacggcggcagcggacgggacggtgtagacgaagggcccggcgagcacgtcgccgcaggacgtctgcagcagcggctcgagcgcggcgacgacgtcgcgcatgtgcgggcgggacttgggcacgctgtggaggcagtggtacgccaccatggcggccttccccgccgccttgtccgagtagccgccctccaggctggggtccatcacccggtgcagccgctccggccgccggaggtacggccgcgcccagtccacgaggttctgctcccgcccgcgccgccgcttgtccacgctccgccgccccgtcagcagctccagcagcaccaccccgaagctgtacacgtcgctcttcgccgtcaggtgccccgtcaggatgtactccggcgccgcgtacccgtgggtccccatgacgcgggtcgtgacgtgtgtcgcgtccccctgcgggccctccttggccagcccgaagtccgagagcttcgccgtgtaatcctgcatcgcccaacataatataaatctctccgtcagccacaacatcataattaactatagctaagagcaagtttaatagtatagccaactactaactttaaatcatttataactaatctaatagtctattcatacaatagttaactataaaaatatactcacaattaataaccggtcccacctctcatacacacataatattttggagtatgtgttgcagctgtttttctctctcttctcttttcttctcgatatgtgattatagctggcttatagcatgcgtaactgctctaatgtagcattgttgatttgaacttttgtttgtatatggtgtcagcttagtctatgtttctgtgtaacataaactgtaccagactcgataatgttcacgtgtgattttgctactacaagacgatttcgtgtcaaaattcgatgctacctgccatgggccggcatgtgtgttttactcgtagaatgttctctttactgtttaggtgggtaattaactagtcaaagagagtggttagctttgcaattaattgctcggacaaacgcttgacctgtacaattttactgttctagaggctttgtagccacagtgctcatgaacagcctttgcaacaaccaattgtgtaatctggccggcgatcgatcgacaccaaaccgtacgtttccctaatttacatatctgcttagaataacacggacgtttttgtccgattaggtaggaggcataaataaacaaccaacccggaggagagtagtcctacataatttgttcatttctttaagttttggatgcactagtacttaattaattctccatttcttaagttggccgccacaactaataaagtttgccacaaagaatcgacagagattggccaaaaactatagttcaaatcgtgtactctctactctatatacgtgcgtgctgcccctgcagctaaggtatagcttatggccttattagattcagaaaattcagaattgactagtggcgatctggcgattaggcgaacgggtcgtagtcaccaacgcagattaagaaatcttaattattggagccgatcgtacgtacgtgtgcaagatagacctggtaaaactaattaagcataattaataatcagaggagtactcaccgagtcgagcaggatgttggatgccttgaagtctcggtagatcaccggagtgtcggcgtcgtgcaggaacgcgagccccttggccgcgcccaccgcgatcttcagccgcgtcgcccacggcaagctcgacagcaaatctgcaagattaatcaattaaccgcgctcagttaatgatagcaattactggttaataatgatagtgcaattgattagtgagggtgattaagcttactcttgaagaggtggtgctcgaggctgcccctggccatgtactcgtagacgagcatccggtggtcgtcttggcagcagtagccgatgagcttcaccagatgcggatggctcaacatccccaggtacaccacctccgcctgtgcgtgacaaaaccacgcaattaattagctacgaactcgactaattatcgtcaaagagtaccacggaattactctgtacgtaccagccattcgcggtggccctggtcgccttcgccgtcgaggtacttgacggcgacgtgctggggttggaggaggccggggcggagcttggcgtcgatgaagcccttgtagacggggccgaatccgccctcgccgatgaagttgctgccggagaagctgcgcgtggcggccttgagctccgccagcgtgaaggcctgcagcccggactgcgccagcgtccgcgacaggtcctccagcgacagcgaccggagccgccccgtcgcgctccgcatccgcctcaccgccttcttgttcttcaccaccgccgccgccgacgccttcttctcctcgtcacctcccgtctcgtcgccaccgccgccgaagaagcaacgcaacatcctcctcatctctggcaccgcgccgccgcgcgcgagtgcaacaacaacgacaacaacaacgacgagagaagaagtcttttcgcgggagagagtgcgggtgaggtgaggagggaggacttggtggtggaatggatggtttgacacggagtggggtatataaagaggaggcgggagggagggaggcgtgtggggggttggttgggttgggttgggtttgttcgttgggttggctctcggagtctcgtgcgcgctcgcggagtcgcgcgtatgaaacggccggattgacctgatcacctaggcgatgcccacacgccggccggacggctgggttaacttggtggtttccgcggggggtgatgtgatgctgagctctatagcctctatgtccccctatgaggccgaggccgtccaggtagcttgacataatggattgtttctctcctgttttttttgtctatattttataatagacaaacattatataattagaattatataattagagcttggctgtatcggtgaattgaaaataaaacccgagctaggttagacaaatataataggtgattggctcggtagatggactaaagataaaatactagatctactatggttccgcacacgtgaagagggctactacatatagtggaaaggagatggaagaaaaacgattgcacttttaatgtagcagagaaaattacactttaattccgatgaatattgtggaggagctataaaagtttcagagccaagacaaaactaaccagtacattgagtattttcttaaaaaaatatatatgcctaatttatgcaaaagaaaaatgtgttcaccaacgagcccagctcgtcacccaaaagttgttgagaggtggcttcgctattggatgaattaatataatagtaatgattctagattaatcctttcacgatcctcgaggtggtataattgagtgccacagtaacactaaatgtgtactccctccgtcccaaaaaaaaaggcaaaccctgggtttccgtgtccaactttgactgtccgtcttatatgaatttttttataattcgtatttttattgttgttagatgataaaacatgattaatattttatgcgtgacctgtctttttaatttttttttcataatttttttaaataagacgggcagtcaaacgttgggcacggaaaacagtgtttgtctttttttttacggagggagtactatattttcaaaacttatttaaggatcttaagtattctcttttcatagtaacgttacttcgtacatacgttacatgcgtataagaaattaattaatattttaatgcagcattcttggataactatgacaatatttgtgctggaccacactgatgttgtttaaactaagaagttgtaataagcgttggaatttcacacatttgaaaaatataaagtagtcaatctctagcatttgatggatgtaaaatggtttaaagatgatgtgactgggaggggctatgtatgttgcttgtggaaagaattaaagcatggatatggtcggcttgttgcttactacctccgtcctaaaatataactatttctagcacagtactttatcccaaaatgaagctatttttctacctacctttttctctcaaccaatcacaaccattctttttcacctactttctctttttaaccaatcacacaccttcttcaatcattctcacctactttcttaatacccgtgccaatctaaaaaatatttatattttgggatggaggaagtatgttttgcatccgagtcatggtaagacagagacatcttaccttcccttcaagtttctattagaagatcacttcatttatgttgttttctactagatggtttattttatttttaaaggggaaagcgaccatgcaaaaactaatgatgtgtttatggatcttatcatctggacttgtagagtttaaacagacctaatgatcagggtgtagaacatctgatttgaatatctatctatctatctatttcatctgtagctaactgaagccaaaaacaattcgactagggcttatgatcaaccgattgatgttgaaggattatagcaatgaacgtaacgacaatagaagtagagaactgccttatttttacctacatcaagctcgtcagttcaccctaaaacatatggatgcacaatatatagtctatctcatattataagtcgttttaattttttttatagtcaaacttttttaagtttgatcaagtttataaaaaaattagcaacatataaaacattaaattagtttcattaaatctaatatttaatataatttgataatatttttgatttgtgtttaaaatggttctatatttttccctacattttgataaaattttaaaaaaattgactggaaaaaatcaaaatgacttatgatagggggagcgcagttaattggacatctagaaagaaagcctcaaaatagagaacatggataactagctatggcgatagctaattaattaatcaaatgcttttatgctaaagataaacacgactaaactttagtaaaaaaatgcaggatcaatatcgatgttgaaatacaaatgtaggggggagttactccttaactagtggaagagcagcattctatatatattatgcatttggtgaaatagtgtcaagtgcatgggtttgcttcgaactaaactatttggtgctcgtgctcaccatgcgatcaggtagaagaatctcatgcacatgcacacatagttccaatcaaaggaacggggaatccaggaaggctggaggaaagcaaggcgctgatacgaggaacagtaaaataatcagccaaccaaaccaacccttgcactgtactagactgttcatctatctgttgttagatttgcctatggctggacgattggcctagagtaagtttaatagtatagcccactactagctccaatttatctataactaatttaatagttaattcatacaataattgcttactatactattaatatatggtctcactgtcatacacacagtgtgtactggagtccgcgctgcagctgactacagatctatagcccgctgctcttctctcttattttttatctcattaaaatatatttacagctggctaatagactgttattgtacctgcccaaagaaaatatgtttagatcaacagatagatggacacctgtaagaccatatcataatacttctggtgagaatacatgatggagaccaggatgaatgattagccgtatctgcactcgatttgtacgatgtgtaatctctcaacgattgaggtgcacatgtgtgtgtggatgggtgtttgtcgaggaatcttggaatggttgatgaaataatggccattgattggctctcgtttctcctgagtcaagtagataatcactttgtttacaggcgttgttcactcttcgccatcagcataaccttttaggttgaacgaattatttcgccatcagcataatcttccgtaaaattcttgctttttgaacgggaaaagagcctgtctattcgtgatgcggaaacaagtggatggtgttaaagtgaaaagaatgaattatttgtagtcctacagataacgagatcataggtgaaaagatagcgtgaaagccatcctgtcttcctgattttgtaaaaaactctcactctgtgtccctataagaacagagcataaagatggctactcatactgatttttcaacctcgattttcagtgatatatgtacgattggttgatgaactaactgcacgattcaccgtcacaattactcagtacattcgcattcttatccactaattaatccatcccatttttcaaaataaaaaatatcagccttgaatatatcttgacttcaatcatcgttcgctcatagtataattcaatcccagctctcaggaaaaacctgtgcagtattttttttctcataaccggaaattactactgctgctgtactatgtacttgcatcagcactaaaccattttaattttaattcgccactaattgtaaattcgggcgtgtgccctcgcggacacggtgtctggtttgatttaattttcttccaaccaaactgggccatgagacgctccccgacaaaattggaggattattacagagattctttgcagaaaaaacacaaatctttgtggattaataactaactaataatgcaaacacgttctccaaccaaccctgctcgagatgagtacgagatgaaacatggttttggatttttggagctgtaccatgtttctagaaatggagcggctagctaagacattgaccatttctgcttaacctaactactccctccgggttgataatacttatcatttcggaaaagggtgaggtcaaactttagaatctttgattatcaatcattttcaaaatatttctctttcaaatatggtgactatatgtatagattggtcttaaaaaaatactttaataagatcatatatttgttaacacttttatatatattataatagaaaataatggttaaagttgtttttttgacaccgtgccattgtccaaaacgataaatattatcaacctggagggagtacccgtatgagctagccatgattaggggaccagcactgtactactgttgcattagcacttagccgcagctacttatctgtgagatgatacttcagtactttgtttgtttcttaaaaaatggatttgggttgtcatgtagtatgagttggtaggattagtcttaaatggtattcagtagttggggatgagaaaaaacaatatcactcgacgcggaacagttcatcaagttgtaagtaaaataaaattacgattggcaattttgtaagtatatacttgtgggcaaatgtatcttgttaggtcaatggctgctttgcaaggatttccttgagctgcacaatacaagcactgatcatttgagaggatatcatatcatgtcacaagattgtaagacctcccttgtgggcctgtggcagtgtcgtaattctgacggtttatacgggttgtttaagtatagtcatgttttgaaatataaatatttctaggttttgtaattatagattatgtacatgttttaaatgtaaactttgtaaatttgtagaaaattaaaatttgagatgaaacagagattgtctggctagaatagtacaacatactccctccatcctaaattatagggtgctatcctttaagaaactaggtgataccccgcgttttgctgcgggacttatgtataagtatattttaaatattgttaaaatgataaaagttgaaatgttgagaaaataatatgaaaaagatgatttgacacatacttgttgatctctataatataatattgtagatgatgtatcatgtttgcatgaaatttaaaatatactataatagtaattgctagtgagtgaaaatatgacatgtttgcatgggattttaaatgggctagaaaagtaattgctagtgggtgatgatgtggcatgcttgcatgttgagctttagcttctaataattgttagtgggtaccaactatatagaaaatatagatattaaactcggtatttttttctattaattatattaactatatgtatatatgctaggtatatcactagatttatattttaaaataatttaatacgatgctaattttatattcattagcaatataatatgaaataaattaatgatctatcctatgcacacagaccctcacgtgtacacacgtgcacaccaactaaaaaatatcaccaaaaaatctaaaaaaaatcatacacatactttcaattgtattacatttagggttaaaatcttaacgtcaaattcattatgttttagccgtaacaaaaaaaaaacaaaaaatctgacagttttaaggttgtaattttgtcagaattttatcttttttgttattctctatgtagaatgaatttgaagatgcgattttgcacgtagatgtaatactattgaaagtacatgtatgaatttttctagaattttttgtgataatttttagttggtgtacacggtgtgtacacgcgagggcctgtgtgcataggatacgctcccctatatcttggaagatcgttcttataatttggaaggaatggatagagtaccgtacaagcagccttccaatggaagcgtagaagcaggattttagtactgtagtgcacatacatttcaacctccaccgtgtgcagatgtcaaagggctaaacgtttgacgagagctcccaacattcagaaaccggacagcttcctcccttgaagaattcagtcatgtgctcaatttgacctgtctcagtactcctacggagcactagtgcccacacggctctacagcctttggactcttcctcctcctccgtccagacaagggagagcttctgcttctacgcgttcgtgacgctggatgtttctgcatacgagagaagagaaaaaaaatgagagctctgcatggtttggtttctgtcattctgtgggcaaatgcaggccatgacggctgtaatctgtagaagtattgaatttgaccgagacctgcagtagttagttccggccgatttggtcaaattctaattttcgtctcaaagtgctgctttgcggctggcacctggctagcgagcagtatggtcctttcttcaggttcaggttttgatttttttgaaattttccccaacttgaaaatgcaaaggtttctggactttaaaagcggtatgattgtcatttgtcaacgtttgaattctctagagacctctttcgttagcggctgcggcaggtggtttaaacagagtttttgagtttcacatgcctttttaagttgctattgtttcgtatcctgaaacacttggtgagttctagctgtttcggaaattaggcaccaaaatctgctgttaggtccagtgaagattcgcctttttttatcgattgtgtgccggcttttcttctctgtgtccagttccaaattgatagcatatccaaatctcaactttgcaacgcacttttcagagagaaaaattctccggttgaccaaataggcttcgaattagtaatgttcagtccaaagttcaaatccttgccctattggtgttgctcatctccaaccaaacaagaggttttaatttacagcccacaggtataatacataggtaaccaagttgggtttcattgtttcacacgtcttctacctggtcaatgcaaagaactgttctttctcctggtttcaaaactctccaagtacgccacctaggcttattaagtatgtgacattatactttaaccattaatattatttataatatatatataaacgactacaaaattagtatcatataaaaatattttaaatacgaacataatggtgctgacattaaacacatgtattttttttactttaattattaaccaaaattcctgatatcttatattttagaatgtacagacactcataacgcacgcacactcacttctatgaacataacacacgcacgcacataaaccctatctctataagcatcttctcaacgtcgttactaccgaggctcttctaaactaggctacatgtactttcgctctaaactttaattttattctcgtttaatttcgtggcctttgcatgcatggagagctaggattgggaagctggcaacaaggagaatcagtatgcagcttcaatctgacgatttctctggacgtgtcatgtttaacaacggaagcaaaagcaaacgcttgctgatgacgtgccacgcgttgtgtggctttcagagcgtttaaagacggtttttctctgtgctctgaatatacgtacatgtgtagtacgagagatcggaggagaaagcgaaaacgacggcagctagttgtagcagtagccagtagcaagcgtacgtacgcgaaagcgaaatgacaactaaattaacctcgaatccgtgctgctcaagatgcccggagagcttcaacgcttttcgttttttttcttttgtttaattttatcacgcttaagaagataactgaaactaaaacgtgtttgcctcttcataaacatatatcatcgattaatctgcttttccgagttgtttcacgcgacgacttacgcacttacatgagagtgcaaaacttatcaaataaataaactaatatatatttttattttctgtaaagttgcactctttttgtttcctctgttgcttataagccgtgcaaaaataacgaagtaactaaaaatagcctatgcgtgaaacctttatctatgcgcatttagcaatttaaaagctaatataaaaaaaccacaataaaaacccttaaaaataagtttcaaatttaaattttggctatggcaaataagccaaaagataaacgatgtaagactttggcattgggatttctgaactcctgaaactgtacttatcgtctgtcctttctttctgaagctacacagaaattcagttcattgcggcccagatgtaaacacgtcccttttctcagtcactgtggcagcctagtcatcacgtgaagaacactatcgagctagttgcactgatcgtatctcaactcaattggtcgtgatcagataagattggcaccacacgatcaatcaattctgcgacggccaaattgcagccaagccgttgattggtttaatttcagatgttagcgtgtcaccggcctcttcgccattgatggcagcaagaacgcaagaacctggagatcgaccggtctgacgacgacgaagacgacgcacacgcgcgtagtaatcctcaaggcaagcagaggatctagctaataagtttcttgcttaattaatccatggaggggcataagaaaaatgatcaaaaatgtcagcaacaatgataacaaaaagacgggtttagctcacataattaagagatgataatgacatggcataaacaacaaagggtcgggctaactcatgtcgaaaacgaaagtaaacgggaagcacgtgaaaagcaggaagacgatgcacaactaaaccttacaaaatttctttcagtaatcgcttagcattagtcaacagcaacataagaacattcttatcaatgtctgtccctatgttaattaatctgccgagtaaaccggatagtttcacactatggagactggagataatacttttttgcaggccgcgtagttgaaattaagagggcagggctagtccatcaacgagtgattgattgcatgacatcagtgtatattcagcgccgcggtcagagacttcagggttaaactaatggcgtttttgtttagcctgacgaaactatgtagtagtagaagctgaaacacgctttaaattgcacgaagtcaggatacgtacctactagttaacctgaactgcatatctgaagttctgaaacgtgctgacaatttgtgtatgatcgttcaatccattcacattgctaaaagtccgtggattagcactgtaaaggaaagttcatgcgttcgtccaggaattgaactcttttctgtcaaatgtcagcattccagatgaacatgaaaatctagcgtttttgaaagccctgcaacaaatggtgtgtttagttcctgaaaaaaaattggaagtttgaagaaagttgggagtttaaaaaaaagttggaagtttatgtgtgtaggaaagtttttgatgtgatatgatgtgatggaaaatttttgatgctttttggtttttgaaaaaaaacatcgacagcaattgggtcggagttttattctccgactcgcatcatctccgatcggtatttttttattttctccgatgggcttgcagaaaatccatatagatgcagaaactagcactgcaagtctgcaggagaaaaagttcatgcgtttccctatgaatatttgagcatgttttctgtcaaacgtcagcattccagatagatgagtctgaaaatctagcgtatatttctgaaatccctggaagaaaacatcgagggcaaagggggcagtttgttttttcaatttccgatagcctgaacacgttggtcagtattatcgggatcggagttttaatctccgaccctccttgagtcagtatttttccttttttggagccctcaaaaacaagacgaacagattgaaactccgaaccccttcggtcgatatttcctacgagacgagacaagacatgcaatccggcccattaatttgtgtccaaatcgtcattcataaacagtccatattacagccggcagaaaacgttacaaacacaagaacattcttatcagcgtccatatgttaatcaatccgtagaactcactcactcaggtatgctggacagtttcgcactacagatagacttttgcaggctgttgtgtcgaaattaagaggcggttctagacttctatacttagctgctgacgttagtcctccaacgagtggtatgagaaaattgacatcagtattccgtgggcagaaacttaaaggttaatctaagacgttctgttagcctgacgaaactgtaatagaagctgaaacacgcgctcttcaggaaaacctatcaatcaaaggacgtgactatcaaccgtgctgacatgctgtgtaactgtgtatgatcgctaactccgttcatattgctgaaacgtgtctaattgttttgagccttttggggtcaaagatgtgacgtaaccgtggagagttttgccgatgagcagtgtgctcaagaaacgcagcagcaatcttgtgtttatgtgttcctccaggagtattttatatttgctcagtttctgtaaaacgtcagcattttaaatgaacctggaaatcttgcgtatcttttgaaattcttgaaagagaacattgagggcggtggcagtttatctttcgaattttattgatagcctgaaaaattcgatctagtgtgttggagttcctgatagagggcaacgcggccgccggcgctctagcgtatagagtattcaaagtcggggggggggggggggggggggagggggggttgtgtgggtgttaattctccaagagtaaattgcatcggcgatacacgaacttgtcagttatgtaaaatctagtgtatgaacttgcaaaatgctcattttggtgcatgaactaattatcttgtgcgtgcaaaataaagtcaaaaggacattacatgactaattttgttgatttatgtgctgattaggatactacgtaaacatatatacgagaatgttgctacttggacatacacctgttcaataaaaagatagaatgagatatagtgattgtagagaaatatataaaaaaccaagcaatgatataagggttagaaacatacgaaattcaagataaagtagaaaacaaatttataaatatagcatgtttttatgcgtaattactatacgtattcacgctacatcctaatcaatatcagctaggtggaattaaccttgccaagccattttggacctagtttgcacggattagataagttcgtgtaccaaaacgaatattttacaaattcatgtactaaattgcacccacctaacaagtttatgtatcaccaatacaatttactcattctccaacctcctttagactttttttcttttttttaaaaaaaaaggcaaaaggggcatatgcagcaaatcaaggccaaccctgccaccatgtcaatgtcatgggtcggtgtagccttgtcaaaaaggtaaaaaaatcgaggtataggggttcggagtttttatctctgaaccctcgagtcggtatttttcctttttaagtcccaaaataggtcagtaaatgttttgtttttactcgcggaagcagtatacttggtttttatataggcctgtaattttttttatggaggcctgtgaaaaattgaaagtgtaggtggtaggagttttcatctctgaccctccttatttggtgtttttttggtctaaggccgagtttagtttctaactttttcttcaaattttcaactgtttcatcacatcaaaatttttgtacatacataaactttcaacttttttcttcaaacttttaattttagttaaacttctatttttggcgtggaactaaacacagcctaaattgtccttccaaatacattggcttctgctgcgcaacaattcagcccacttttgcggaacggcccaagatggcacctgcagtaggtgcactggcccgtagccaagttttcccagcccagccatgactcccttgagggatttagggggttcggagtttcagtctctgaaccttattgagtaaatatttttccctttttggagcccaaaataggtcagtatatgagttgttttactcacaaaaacaatattagctttctttggcctgattttttttcctgatggagaggcctgtaaaaattgaaggggattgtcggagtttcaatttccgacccttttatcagtggaaaaagtacaccggaggtccctcaacttgtcaccgagttacaaaatcgtcccccaaccgcaaaaccagatatccggcgtccctcaacttccaaaaccgttcggtccttcggtgtttttggctccggttttagcctacgtggcgactgagtcagcgtgggccctacatgtcagtgtgtccacgtcatcactccctctttttcccatctctcatcctctcttatcccgtactactcagttactcttttgggcaggccgaacccgccggcgcaaggtggggagagggagggcggccggcggtggccgacgctggtgcggcgacgacggcggcggcggcggccgatgctggggcggtggcgactggcggtggccgacacgggagaagccgagacgatggcttctcctaccgcgggcgcgaggcgggtgggagggcggccgatggtggtcgacgttgggggcggcggcggccggcgatggccgacgcaggagaaggggacacgacggctcctcctaccgcgggcgtgaggcgggagaaagagggagggcggccggcggcggtggccgatgctagggcggcgatggcggtcgacgctagggcggcggcggctccggcttcgatttcctccgctctctcctccgccgcatcctcccgtcctccccgcccgcctccctccatccctccgtccgcctcctcacctccctttcctccgtccgccttcctgcgcgggccctccctcatccaaaacaagcccaggtgccgccgcccgatgacggccacagccccaccgtttcccaccattgccctcgttggctctgggtcctcatcccaccttcggccacggcgacctcctccgcctcgccctcccagctgcgagcgggatggccagcgactcggcgagggagtggggagtccggcggcgagcgcgcacaaggaggaaagaggcggggaggcctctttatccgcacggccgccgcccgtcggccctatccctgccgcccccgctcctccgccgtcgcctacagcctctgcgccgccggcctcctccccaaccggcctgctcccgcgtcgtcgccgccgccgccgcgtcgcctgtcgccagccgtcgggccttctctcctctcccttcttgccccggcgacctcctcacgacccactggccggcctggtagaggagaaaagcgagagacagagagaaagaggaggaagtgaaaggagggaaggagagagagggtggtacgtggcatactgacaggtggggcccgcgtgggtcccgcactgactcagccgccacgtatttcaaaaccggaatcaaaaccaccgaaggacctaaagtaaacggttttggaagttgagggactccggatatctggttttgcggtttggggacgattttgtaactcgatgacaagttgagggacctccggtgtactttttcctatatcagttatactatatgtttgggcccaaatcgtccttccgaaacggcccataatacagcggcttctgctgcgcaacaaggaaaaagtacaccgaaggtccctcaacttttcatcaggttacaagaacgtcctcgaaccgcaaaaacagatatacggggtcccttaactatacaaaaccggtcacaataggtccctcggtggttttggtcccggttttatcctacgtgactgttgagtcagcgtgagacccacgtgggacccacatgtcagcctgtccaggtcagcttctctttctttcccctcttctctcccttcctcttccagtcttccctctctctcactcttctctctagggctctgggcaggccggcggaccgacgaggcgaggcgggagaggaggtccggcggccggtggcggcggcggagacgacgcgggagcaggggagcaagtcggcgacggcggcgagatgcccatggcgaggtactggaggcggagctccgtcgggacggggagcgggacgatggcggcggacggcgggcacggatcgcgtcgcccgcccgtggcgacgccagcgccggcatcgcccgcccgcacgcgatctcccccaccgccgatctaatgatcagcactatgcactacatggcaaccattggtggtagtgtggtactagtcgtggctaactaactggaggatttcctcatcattcctgtaagtaaacagcagcagtcaattcacaacaatggcatctcaccgtcaccttgaacacataacaggtgctgaagggtttggtagtgacgatggggtcatgcagtgttgttgccactgcccactggtgaaggctttcaccatcgattgctgcggcatttgcttcaagagattcctcaacgtccatagaatcgacttctgtctcatcagactccattggcacttcaaagaattctctcttttctgaatctgaagaagaccaattagatgccgtggcaatttgtggtggcgtccaaggaactaaagccaagaagttgctgcacccaggagatttgtcctccagcccgtgatagttcctttgcataaaaacctgatctgaaagatgagaaagaaaatggtgagaagcaatttcaaggtatggatgataatcctgtcctgacatacaggagatcttggtgggactcgatgaggaggagggccgagggcaccagcacgcattgcggcgagccgcatggcgccgggcggtaggaggcggaggcggtcaggttgaacggcgacgaggcggcgcgtctggccgctgacaggggagaagcgcaatggtggcgctctgcccctcgctgtcacctccccggtcccatctttggccgccgtggagccccactgcggccgccaccgccgccgccgtcgccggccatcgtcacggcgccgccctcctcctcttccgccttgccccaccgagctccgggccggccgccacccttcatcgccagagtcacgaccaccatcgcctcgccagttcgccgcgccgagcaacaggaagagaggcaagaaaagaggggaacagagaagatgacgtgtcatactgacatttggggcccacgtgggtcccacgctgactcagcagccacgtaggataaaaccgggattaaagccatcgagggacctattgtgaccgattttgtatagttaagggacctcgtatattggttttgcgatttgaggatgtttttttatcccgatgacaaattgaggtaccttcggtgcactttttccgcgcaacaatggggaccattaccgcggaccggcccaagttggcccaagtgcactagcccagccacgagtcaatcggtgtcactgaacagcgggccccagggagaacggcgcgttctgggccccaccctgcagcgactccggctcgctcgagcgagacagcagccaaaccctccactcctcgcttctccggtggttctcttctcttctcttatcccccggagacgccgctgcggcgccaccccctcctcgccgtggacctcggggtgggagcgtggcggcctgcacagccggagctcagctcgcccgccgcgtcggatggacgccgcctcctgctgccgcgtaagcgcgggcgcgctcccccgatttccgttctcgcttctcgaacgttctagagccttctacggtgggggatccgtgtggtgtgacccatcgtcgcttctctcgctctcgcaggtcttctcgacgcagagatgccgcttcccgctgcggaggctggcgccgccgatttcgcggcggccgttcggcacggagtcgacgagtgagctgttcgccgcgtcgacctcgaagcggcgctcccgggggcccgtcatggcggcgaagaaggccgccgagggtgagtcgacttgatcccattgctgtactgttcttatttttggttcaggttgagggtttggtgagggttttagtagggggattggtgtctatatgttggtatttcagtgatgtgagttttggctgtggagtaggtgcattaggcgtccgatttttcttgggattactctgtgtctgtggtcaatgtatatcgtacttgctctgtggattgtggggatgccagccatttttgtctggtgaggcgttggaggttgaagctggtctatggcctggagattttcgttcttgctgttcacgttttgatgggattgatcacagggtgaggcacatgattacagatattgaactcgtgtgacgtacagcttaaactggttggttaatttaggttcaaatatgtgattgtagtttccacttctgcaattgctataattattttcagcttaagcacgtagggcttattaaactcattaccaaacttgttttactgcagttttctgttacatttgtacttttatgattgatgtgtgttacttaggctcaatctgcttggtttagccttaagtatgctatgacctgggatttttgtaattggtgtacttttcagatttaagaatgtacacacctattggacttctcagttcgcaccaaaatgcacttattaggtctcaagcaccatggttggaagattattattgttttgcgtatcagattaagcttaattctcattttctccatttggagtagcatcaactagtgctcgaaagtcgaaacttgatgcttatgcttgttaggatgaaagctgtttaagcttaaatgtgttttgtatacccagaattcggtaatcagattgatttttgaaaataactttgttatctggtgttagttgaaactttgttatttcagtacattccattgagattcaaatgcagtgagaccctctgcttacttagtaggtgtcaatactgaagcttttactggcaaaagttatggtgtattttgtaatgaaaatctcgtagagacatgtaattaattttatctggctgttttataatgaatagtagttggtagtttgacaggttgagtcccagtttcaatttagtactgcttgcagagttaaattcattaagatataattatatatttagcttcttgattctggctaggtgctaaacaagaagaggggaaatacaaacacacggtggatctaccaaagacaacttttggcttgagagctaattctgttgtgcgggagccggagctccagaagttgtgggaggagaaccaggtgctcaagagggtatcagaaaggaacactggggtgagtatttcttcgagtaaagctaaaagtaaaattaaaatttacctgactttgttggttttcttgactgttggattaggctacatttgttctccatgatggtcctccttatgctaatggtgatcttcatatgggccatgcactgaataaaatcctcaaagatattataaaccgttacaaggtatcgtttactcttcaatctaatctgagtatttttctttaaaaaccattgatgtatttttcagggcaattactgatgcagtcatagtatgttgtcttattcagttcaatccataggatattctctgttctgagatcaatgttactgtacggatgattggtgcatagattttattgtcttttccaatgcagtgcaatttctgtcatttctttatcttaacatgtagagctctttagtgtagttgattgtgtacgagatttggatgattaatgaactttttgctaattctagtagttttttcctgataactctcttcgctgaaatgtctttaactttttttggctggatgactatgctttttatgttggtccaaaccaaaattgggaacataaatcaactgacaccaaaatttgcttttcttctgtgtgcagctgcttcagaatcacaaagtttcttttattcctggatgggattgccatggccttccaatcgaattaaaaggcaagttcatctttatatccaatggaaacaccctatgtttacaagaagttaggtaggggttggttttaacacaatgcttgcatgtgttagaccagccaagtaattattgaatatccttccaaatgtaaccattgactatttgctgcagttctaaagtcactggacaaggaaacattgaatgctctgacacctataaaattaaggcagaaggctgcaaaatttgctaaagcgacggttactacacaaatgaattctttcaaggtaaccatttctttattttaaagtactttagtggtgacatgatctaatagcaagttgcccttatctatgttttgtggtatttcctggtatgattgctgacttgcagtcatctaatatctggaattctgtctcatgttagcctttagtttcatatttctataattgtattaaccaatgacattgtgcctgcagcggtttggtgtatgggcagattgggacaacccttatctaactctgtcaccagagtatgaagctgctcaggtctgatcctattgtttatagtaattttgccattgcatcaaaacttatttatccatttcacatgaatgaaagcttggaggtttggaattaccttagttagatcattgatatcatcttggtcacattatagctgctagctctaataaaaaaaatagagctgtttactttcagttccttttagtccatttaccatcgttgatataaaatatataacgtgtatgcaaattttatgctgcgagaataaatactgatgttttctttttcatccttatcatatgtttttaatcaaggctaaccgtaacaactcttgttctccattttgatatgccagctagaagttttcggccaaatggttatgaaaggatatatctaccgcgggcgaaaacctgttcattggagtccgtcatcacgtacagctttagcagaagctgagttggaggtatgcttgaactttctacttgatgctattaatttgctgtcaaaggctttgttgtgcattaatttttaagtgactattaaatattcgaataaaaaattgacaattccgatttgtttcctgtttaatttcaataattttcttgtgcttcagtatgtcttctcagtgaaaagccactagatgtgtcacttatttcttcctgttaatattaggcctacactgctgcagaaaaactaccgagcttttttcatgaagtcctttcatgtttaagaacacttctcttactaaccaaccataagagcgctttatgtgtcttattacataaagcacattacttcgtacatgtagtctttcacttaattcatgattggtgatcttttattttttttctcccttttcatttatgttctttagatttcttttgaatttgattcctcatatcatcacatgcattccttctgttcttccagtattcagaaaatcatatttccaaaagcatgtatgctgcattcaagatcaccaatctgtctaagcctgggttgctggaggaatttctccctaatttatgcctagccatatggaccactactccatggacgattcctgctaatgctggtgaggtgatgccttgattgctttaatgtattcagtgagtgtcactcttataattggatttcatcagagccaacgtaattaatttcaaaatatgtggctaattttgaagctatatgcgtctgtacatggaaaatagcatattaagaaacagaaaacttcacatgttttgtagttcctagaacctgtaattcctagaaggctagaacttgattaagaaatactaagtaatatctacgttacagtgatataacatagtttgattgtaaatcatggcacacatcttgcttccaataaaaaaaagaaagctctttgccgatttatccctccatagcaagaagatgcttcatttcaagtatgggtaagatcgaataggtgatactggtatgctacacagcatttcatgtttttgtttcaccagcagaaacagtgtcttattgtctcagctattctggaattgtagtagatagcattatgtccctgtctattcttatgtgtctgctgcgcatactgtatggattcgcttcaactctttggtattctctacatattaacttgtctaagaagccctttcttctttaaccagctgttgctgtgaaccctgagctcacttatgtagtagttgagctgcaatctgtactagaaagtgaatcaacatctggtggaaatcaacgaaagcttgggagtattttgagccctgggagtcagaaaccatttatcatcgtggctgctgatcttgtctcagctctagagtccaagtggggtacaaagcttataatccagaaatcatttcctgggtcagccttggagcactgcaggtattttgtttagcacttctcacttcattatgattgtgcttgacctatttattgttttgtgtttatttacattatatttggtgttttcaggtatattcatcctgtgaatggcaatgaatgttctgttgttcttggaggagattacataacaactgaatctggcactggccttgttcatactgcccctggccatggtcaggaagactacataacaggtttgaaatatgggcttcctattgtgtctcctgtggatgatgaaggaaacttcactgctgaagctggacaattcagtggtttatctgttctgggagctggtaatgccgcggttgtgaattatctggatgaacagtgttctctcattttagaggagccttacagtgagtagattgacaataacctccacaatctggtttcacttgtgaatacgaaaaaccttattaagtttgtcttccaattgtatctcttggttcacagaacacaagtacccctatgactggcggtctaaagaaccaacaatattccgagcaactgaacaatggtttgcctcggtggatggtttccgtaatgctgcaatggatgcaattaggcgagtatcttggattccttctcaggtttgtaactgctatactttattttcctttactcttactgtttcactgaacttcccagtttgaacttttgttctctttagtggcgacaaagttcagtagaacacaaactgctatctgatagtgtttagcatttttgttcagtgctatttctcttctgcactggtacatgaaattctctatgctaatcttgcttttttttttgttgctttggatcctggaaacgtttgcttgatttcacatattatggtcaagcaattgcatatttgcatgtctggttcatgtaataatattgatagatatccttttagacccttgtaagttgtaagttatagtttcatgctgatatggaatgacctaattgtactgtctgctagtttcggtacatcatcttatgtaacttgataataactgagtttgtgttaatattcccaggctgaaaataggattgtggccatgacttcaagccgttctgactggtgtatttcgcggcagagaacttggggggttcctattccggtcttctatcatgtagactcgaatgaacctcttataactgaagaaactattgaacacatcaagggtatgtctacgcttgtgatttttactggttgaaaccatcgagtacttgaacattactgtggctcaccttctgccaaacaagcatgtagttctaacgtcggtagtatctagttcttgtcacattatgggtttgcagcatggttgtatccgagctatttaagcaatataaaattcttgtttctaataaaaagaataaaaagtgaattagaatgagatgccatcttttaaagttgtcgcatctaagtgtgttctctgatttgtatttccacaatgaggttttagaaaatttctgttctaggaaaaagcctgaagttattgtatccaataagtgatccttttagataatggaagctttattacgactcagtcaattacaccaagatggtacaatccaactgagcccacccccggcctctgcattgaatgcacacagccaaaaaagaaccataaaaaaccccatcccaagcacaggagtgtgaaggaaacataaaattagtggttatcaatccgtagactagactgccacccgtgctcctgggtaaaaaactcctgcgccacctggtccaaacgtcgtgataccatttgtcatgaagctgttaaccatttatgtttgcacttttctgaattagcataggataagccttatgcttgacaatgcttcccaggaatttaatttcattggcccagttatctctttattttgtgtgtgcataatagaatttctgggttattttcctctgcttggattttagaatcccaaaacatatgttaataaatatagtttgcttgttactcaggtatagtgtcaaagaaagggagtgatgcctggtggtatatgacaattgaggaacttcttcctgaaaaatatcgtgataaagcatctgagtatcgcaagggaactgatacaatggacgtttggtttgactctggtaggattatgttttcattcttcctctattaatggttttgttaacaaagctcaatgtttgatgctggtcacaatgcccaaaatcaatgttcttaggagaattccatcttgtcttgctctgctctccctctttgaaccttggcagttttcagatgtttgtagttttaactgctttaaccttcaaattgaaccaaactgcccaagccatgtgctataattctctcttttttatactgtggtagtgtaccgtttgctttgattttggccatacgtatgtcacagtgtggcgccgcttaggaaattaactatttttaaggtgtagcaatagacacttttagtagggataagattaaactctaaaacatcaaatgaaaaagactggaggtaattacttgttattgagtcgtcatgcattgtatagtttgccatatagtttttgtttacagacctcaacttttatttattgactctattaagggctcaaggcgtgcatattgtcatgattttctgggcgaagatagagctttgcatagtgtcacaatgttctaggaaaagatagagctttgctatagtgttttcttaattattttgccatcttttcttgtgtccttgactttttacttctgcatattttcctaatttaggctcctcatgggctgctgttttggcacaaagagatggccttaattttccagcggatatataccttgaaggttcagaccaacaccgtggatggtttcagagctcattgttaaccagcattgctactacaggtaattgtgggctagaaactcgaatgaaaatcccttttttgaaaaagcaagttgttttgcaacattaattgcccaaatcatggttcatccatgatgttatttattctagatatataagatgttttttgagccatattcggtttagtgtctgacatttcaaccactagttgtgcaaatggtgaaaatttttctgtaggcaaaggcaatagaacaatattgcttgatatagttgcataatctgaaaccacatgtgtgttttctcttgatatatttggaacattatattctgctggtggacacaataggttttctatttataatttttccattaaaaaacaggaaaggctccatattctagtgttataacccatggttttgtactggacgaaaagggtttcaagatgagcaaatctcttggtaatgtggttgatcctgagaaagtaattgttggtggtaaaaattcaaaggtacgttcctagaaaagcttccgttctttctggacttctagttttgcctaatgaaatatcaatcaaccttttgtagcaagaacctggctatggagcagacgttcttcggctatgggtttctagtgttgattacactggagatgtgttggttggtccacaaattttgcgccaaatgtctgacatgtaccgaaagctacgaggcacaatgcgattcctattgtcgaatctccatgattggaaagtatgttcagttcaacaactaaaatttatttaggttttggataaggaagattcagtaccaggcagcagaggccattttatatgttttcaatatttcaaacccatatcaaaatgccatcttttactagttttacattttgcttaactttctattggctttattctttcctttatcgatgcaaagcactgaagctatttctgtttagataacatattgcagtgaatttaatattttatacagcctagttgaatacttttgctgcacataattttaatctcttaattatctatctgttttcccttcttatgttttgtttgcacattcgtttcaatgatcatttattgctctttattcttatcatccttttctctctttcctgtcaatagccagaaaattctgtgcgctacagtgatctaccgaaaattgacaagtatgcacttttccaactggaaaatgttgtgacttccatgaaggatagctacgagaactaccaattctataaaatataccaggtgggttaagagtttgttgtgcttcattactttcattttacaatgtgtgtgatctcttctatactttttgagattgtgtgatcgtagttggtgtatgttggtcaatggtcatctttctgagaaatgggaagtgcgcttcatgattatgatttagtgaataagagtttgatggtcaaaagtgaaaacttttagcttgaaagtggaatgttcattttctaattactgtccttttctgttctccattctggatcttgaatgatatgtttattggattctcaaatcacatgcacattgaatgattatatcatgccatttatatgctcagaatggtatgatatgcatacattattaaaagcaaatcctattgctaaatctctatccatgattggcaaagagctgcattatcatcatctctagataacggcatgcctgctgcatcatttgtttgtcctcttcacacttttgtaacaagagattattgacttgtgtttctatttcagatcctccaaagatttgctattgttgatctctccaatttctatttggatgttgcaaaggatcgactctatgttgggtatggctttgatatcttgttcattggccatctgattacgtttcgttacactgaaagctcagtcaatgtcatttattaatttagcttgccagcttcacaactttgtttttatcttcttatcagtggccgagttagctttacaaggaaaagctgtcagacagtcctcagtgcgcatctgctctatcttgttagagccattgcccccattatgccacatctagctgaggatgtatggcagaacctaccgtttcaacacacactggatgatggatctgttgctgagtttgtttttaatctaaaatggccagttaagaatgaagaatggctctcggttccaaaggatgatgttgattttctgagtgttatcctcgaggtatgcactgtttctgcataactttgaagcgttcacttatgacaacctcataggttatatagctttgcagtttttttcctataggtcgaatatcaaacttacgttaaaaaataaaactctgccttcaacttggagacgtgcaactcagacaagatttcttgtatacacgagtaactactacttatgatctgaaatagcatcatttctgctaaattacctgatcctatagtttataggacattgcggctattcttgatttcatggtgatgagcgaacttgcatttatgatttcgtattaagattaatttcatgattaaaaaattccattacttggcaacagttgagatcagaggtgaacaaaattttggagagtgctcgaacaggaaagctgataggctctagcttagaggcaaaagtttatctccacgcggaaaatgctaacacagtgtccaaactaaaggagctggtttcggcaaccaatgacgctgatgctctgcaccgcctgtttatcacatctgaggtaaattcaaaactagaggctgcccttctgcattcaagttttttttttacaccatctttctttgtttctgcaggtggagatccttccttccgtaagctccgaaactacatctggtgtatcctacactggaacttttagcagtgagcgcaccggcaacatctggattggtgtgactcgcgccgatggcgaaaaatgtgagaggtgctggaattatacccgagacgttggatctttccttgaccatcctactctttgtgcccggtgccacggtgtcattgatctgccaccagttcctgctgccgcggctgtcagctgaggctgctcgagagtgacaaggaccactatcagcttcatttgaagattataggtggaattaattgtttttgttctacaattttgttcccctctgaccgatgatgctagaggaaggggaaacttgaagagggtttcggaaacttagtttctaacttcatttgttgcgtacaataagttgtaccttgatttttgaccattgcttggcttcctggagctgtaattgtatatttgtattgcagaactcacacggattaaagatggaaacagttttgcacacgaactcgcatctccttacttgacgtaatgtcagagcgctagcaaacgaaggggcatttttatacaaaaatcaggaaccaaacgaacgagacggtccgaaattccgaatcacgttaccaaatactactcctagcgacccaaacgagagttttgtttctctacagaacgtatcggctcctgtattgggcttagctacaaagttataatgaagatgacgagtttatgaaggctgtatacgataggcttgagacaataattatgtaactttttatcaattatggttggagattcacaaatagatttcaataatgtgttcttcttatcttagatgagttattttttattttaaatgcttgttctcaatgatttattgaactacactcttttttgagtgtaactttgtaataaattggaaaggctgggatattctattcctctataaaaaacgagttttgtttggtaaaagtcaatcggaggggataacgcagggtgcgagaattatggccgttggatctttagatctccaagtctaggccattccccctctcgtggccggtcgccggagatccatcacccgccgtcgcccgctctccccggcgatcctccccgagccgcgcgctcgcttcccccgttgtcaccaacctccacgcaggatccgcaccgccgcttcttctctgcccccaaccgcccaatcccctatccctcgcgagactttgcacgcttaagccttaagcttctactaccatttggatccggagaccgggagaagttggagggcacggactccggaggcgtcacccgcgggaggtcccctctgcaccggccggctgcgggcgcggctctgatggcgcacgagcgtggcggcgccgcgtcgtccgccgcggctcccgccaccgaggaggatgcgctgtgagtctgtgttgcccaaatccctaggtccgtgtattcctagtagacgtttcagtcacgcttctggtgtcacttgatctgaaggccgtggcgattgcagcgaaattcagggtccttctcttgttagtgtcgtgatgcgttcagtgtagtcgaaaatttggtggttcacttgggctctggcattgcgatgtagtactaaattttgggcgtatgcagggaattgagactttgagagaagggaagagaagagcacaggtgatgtttgcttgtggtatccctccagttggtattaattcataaaattggccgtgtacatccaaaccggatgtagaggccaggttttaatccatcttctagtagaaaatttaattcataaaatgaggagtataagcaagggtgacatggtgtccattaaggcattaatacagggtcacttagttgagctgacttagcattcacatgattcttctatgacattgttctaatgttgatttgtctcgatgccttcaggatgtataattcttctttcatgtaggtttattgacttgctacatgaagctcctctctctggtcatcgagagcctagaagcattgttggtggcaccttgtactgtatcttgttggttagtgcaaatttcttaattacccattgtttttatttgtgattatgcctgaaaattatttcaaatgtatgagttcatttgataaattatctacaacagctaaaacatatgtatctctttctatcgctaaacgccattgccttatggtactgtcattacccaacaagtccttgttttgcttcctttgtccattttgtaatagctgtattttatttctctctctaggcaggttatgctgctgtggcagtgtcagccccatggatattttaccttgtaccagacatgatccccccattgctatgcagctccaatgttatcattctgattctaacaggttctctttgagatcagatgtggcatgtttctgttgctgttttctgtttgctactctatttagttattttgttggttcatgttttatcacttactatgacttatggtttgcatggaacataacataggtatttttcaacaatattgggttcaccaggtcagaaaagtgagattgcaggtatttaaatgaaacaactgccttttgttttacttcaattggactctgttaacaccaaaatttgatacaattctttagtggactcttactttaaactttgcatattaactagcacatttctgctttggatgcaggggtattacgattttagtgagaaattgaagcgccttgctcaacttccatttgccaccgttgctagtggtaagtatagcaccaaataaatttgcccgatgctgtaatactagtgcgttcttcattttttttaatgtttataacaagtatgtcctacttaactgcacttgtttcaacatgattaaactattgtctttggtatttatttaaggatctgttaaggaattgagattttgagaggttcatatgtaaaatatttttttggcattgaaatgacccattgtccatattctttttgttcttttggcaggcgttgcttcaatgctcttaatcatagtctggcaacctctagtacacatactatcggtttctttattgctaaggtacacctttgtaattgcagctaacctctgcaaatttctctgttatgtcttgaacggaagttgaggtttatccggcatcttttggcatgaggtttggtctgcggattcccaaacaagtttgggaacatgaattattctcttctcatcctttcagtgcatgtataatttctttcatttactattatgcaggattgctattgtggttgaagctatatgtgctggatgtttcatgagcttatacttatgtgagtcaagtactcaagtcatttgtgtccttgttagatagttcatcttgacttctacaattgcagcagttatgcttcccccaagcagatcctcagccatgcaggacaaaccttgcatgctggagggttcaaagccttgtcatcatgagtttcgatctcgtcattctttttttttttttgctcccactaagaacagtgttgcttttccttagaaatgaaagtttcaagcccgattatttgttttttctaagatataatgcccactcggttctttttacagggcatatccacaagtacaactctctgaatgggcaccctgatattttgcggtccttatattctgcactccaactccaaccatctagttctttggaagaacgaaggtacaacataagggtgtacattaaatgcattgaacttttccttcttaatttacaataaaatactacctccgttttttaatagatgacgccgttgactttttctcacatgtttgaccattcgtcttattcaaaaaaattacgtaattataatttattttgttatgagttgttttatcactcatagtactttaagtgtgatttatatcttatacatttgcataaaatttctgaataagacgaatggtcaaacatgtgagaaaaagtcaacggcgtcatctattaaaaaatggagggagtagtgtttgaagacacgtataaacatgtactatgcacagtttctaccacttcaggcttggcgtttgattttctggcagtttggaaaagcattctttagtccatgtttatcagaaacatctgtattgaacctatatctagaaggatgtgccttcacatgagttacaagtgttgatatgttgccgaatatgtcatatgtgtacttggcatactgccagtagagtttcacaagttatttttcttttcaccaggtattatgatggtcgtttttctgaccagcaaatggctctgcttcagtaccaaagggagaatattcattacctgagtgaggaggtacttggaagatcaatgcagtatatccattttaaaatttgattatgttagattgtgttattatttaaatatttgtacaagacaacagtagattactagcattactatttcatggaggaattagctgatccttgtatttagttctacattaacttaattggccagttctgtagtcagtgctgaagttctcaataataatatgttggaacttccagaaaatttcttgttgaataaccaaaccttttattttcctgaaaggtgctccgcttgcaagaatgcttaagcaaataccagagaactgatgttgggagcactcctcaggtctgcacaacactgattgattgtgttgcattaattaactgaccagcttcgtaggtgcaaaattagagaaaggaactttgtagctattatgtttatgtgaattgatggacttgcatcaacccccttttaattctacaggccgatcttgctcatctattagcatcgcgtgatcaagaacttagagcactctccgctgaggtaattaaacctatattgtaatgctataatgcctctgatcacaaaacataattaacttgcctgcttacactccagtccttgttattttgaccgcgttgttatcttaagccaagcaattttctatattctggccaggcaggtctccaaaatctcacctgtctttggcctactttttatgaactcttgcaaaagctattactatagatgtttatagcacgataatttcttaaaattatattatagctcaactttgtagctgtaaatgataagttgagaaccatctatttgagttgttcatctttagcaccataactaaaggtgtaaagtctttattaaaattttcatcttctactaataccatactaattgaattcacagatgaatcaagtgcattcagagcttcaacttgcacgtagtctgattgatgaaaaggactcagagatccagcgcattcgtgtgagcaataatcaggtattttcacaagtaaccatcaagaggtttagcttagcacgtggatcatgcttattttacttatatcgtcttccaaactgttcctgcttgattacaaacatgttggatgcagtatattgaagaaaatgatagactcagagccattcttggagaatggagcgctcgagcagcaaaggtacactggctaaagttctgttgtgggttgagttgtactagcattatctctcattgttttgcatgtgttcaacagcttgaaagagcactggaggcagagcaaatatcgagcattgaattacggaagaacattgcaaaactccgagggcagacttacaaggatcaaaacacctgatctcccttgttttcaggatatattcacctatggcgatgtttgagcaggtttatcaactcttcagctgctaaaggtgccacctgtgatatccttgaattccaaacctctagtgataagaagagtgccaacacagtccagtttcgctaacaacaaagcaaggtacaagatcatcactcaatctgatatgcatcaaggaaaggaaaaatgcctttgctacacctctctcgtgaatgtacagattgatgtttgtaaatgttgttcgagagtatggtgcagcactggttttttgtgcttctacctgatgcttctacaatgacatcttatcatggcaagagttgtgcattgttttctgagcacttgcgaaatgaaaagtgagcatttgtgcctaagctcccccaaaaaggtatatcagacttctaatttcttctgagttgagagtatcaaatctgtactgcagtctgagatgctttgctaccctttgattcagtttgctttgctatcttagattcagttggctagttctttttcacagtttagtagctttatattacatatgtcttgggcaatgaagctcatgaccaacaaccaatgtgcaaaagcgttcttctccctccttttccttttggacaactggtagagggagaaagttaacaccgacaagtcaatacagaaccaaggaatgttcctgagaataattttgctaaaattctacctcgagttgtcccattctttattaatctacttgcaaattgtaaggtggaattccacatgtcgttaggacgttaggccggtaggcccccatccttgactattgttgacactgctatgcttgatgctgtcttctttaatctctagaaagaaacttgtggggcctttggttgttgaaaatgcaacaacaaacgaccctgaacaaccaggtgcttcaaatgaatagggacatttgagcaaatatcacatacttcgtgcacgagtccaatttgttataattttcaccatacaaaattttgtagttctgcatctgaacaacttctgaagttgcctcaagcaataagcaatttgctgcgtctgaaatacggcaagcactgattattgaaggattactgaagcgcctttttcaaactcacggtaggattgacctcatctggaccgtccgatcgagatccagcggctatattcctcccaaaaaaataaaaataaaaaacgcgccgggttccaaccgtacgagccacgaatcctctctttcccggccaccttcctctcgcgttccactgcatccttcctttccttcctcgaatcgaatcgaagctccgcctgctccgcttcgcttcgccgacgactccggccgccaccgcaaccgcacgcggcggcagccttaccggatcctccacccccacccgaacccgcgaacccgcgtgcccgtgcttcacgcgcattaaagcggcagcaaggccacctcctcgcacctcgctcaccgcacggcacacgcgcccgggggatttggaaattggaaatttcagatcccagatctcgtctcgccgatctcgccctccgctaaggtacggatcccccgcgatcgctgcttgcaagttcagaaatgttgcggccgcggctgctcagcgccggatctgttgtgttttcctgtggtttttaggtgtttgggattttttttcattttgttgtgcaatgtatggagtgtgagattacttgtggaaactgattagtgcaatgattttgcagccatgggttcggttgtggatgctccaacagttgtggctggacaggaggtacgcataatgctattggtgtactaatttagtaataattttccctactgtttattggttgagcttaatgaactgctagatagtttcctatattatttgagtatgtttttagaacacaactgttatctgagaatgtgcaacatgttttccttgaggcatcagagattataaattagatttcctgatcctttggctgtgagtttcgctacagtcaagggctggagcttgaaatcttgcttcctttctgtttataaatttaaaaaccatttatttaggctagaatatgtcgatgtatttctgttgtgtatgattcatttaatcttcatgtatactattataccaatataaattttgactccttgagtcacaacgtaagctcatttatttgtttattcagttcatatccttgcctcatactgtactataatttatgccatccatagcttgtcttatgggtgaaatctgcccctcatgcaggaggtcactgacaacatgttgggtgacaagaaagttacagttgtatttgttctaggtaactgcttaccttctactttatgtttgattataatgtaagtctcatatgagaggaaacgaacttataggaaactttagatatgcaatgaattgacatgataaaatttaagtacttacatagttatatattatatataaataaagagatatattatcttctgtttctaaccaaaaatttacacaggtggtcctgggagtggaaagggcacacagtgtgccaacattgttgaacactttggattcattcatcttagtgctggagaccttttgcgtgcagagatcaaatctggctctgagaacgggtatcttattttcattccataagaaacccaactgtttccttttgtttggaacaagcttttccaaaattcaatttggttatgtttcctcctttgttcaatttctgtctgttactactaaatatttattgttacacttccatgttttatagaactatgatcgagaacatgataaaggagggaaagattgttccatctgaggtaactataaaactcttgcaggaagccatgattaaaagtggaaatgataagttccttattgatggatttccaaggaacgaagagaatcgtgctgcatttgagaacgttgtaagcacatcttctccttgtacttcaaaattttagatcacttcactcttgggtagcaaacagtcatgactccttagtagaacgttcttcaggggccactcgcagcctgtgtacacacacacacaatgacaatgcactaatagcattaatgtgtcaaatgtttcagacaaaaataactcctgcgtttgtgctattcttcgattgttctgaggaagagatggaaagacgtcttttgggacgcaatcaggttttcctcatcacttaagtgtattctccattccattttaaaccttaccaccttatcgccacatgaataacctgttttctgcttccaactttttcttttgcagggaagagttgacgataacattgagactatcaggaaaaggttcaaagtttttgttgaatccagtttgcctgtcattgagtactataatgcaaaggacaaggttaaaaaggtactattgctctttgaatgatgcaaaaacaacaaaaaggatggatagcaataggtattagatgctatacattcgaagtggaagtagtaggagtataataatatgaaagactattctaccatgatattaaagtttcccatgatcattatgagtttctgaccacgattttctttgcacacttacatgaattactgcctacttattttctaatgacttttgacacctattgtaaaacttgttatcttatcagattgatgctgcaaaaccaattcctgaggtgtttgaagatgtcaaagccattttcgctccatatgcgccaaatgtatgtttccacttttctggtttgttatgttccttttgcgtgtatcacataatcattgcctattttcattttgcacctcacattatgatcttatctatcaggccgcttagagcaatagaaaggaccacatgagtgataaattgcaccaactttagaaaaggtactctctctgtcccataatataagaagttttagagttggacacggttatcaagaaagtaggtagaagtgagtggtggagggttatgattggacgagtagtagagataggtgggaaaagtgaatggtggaggcttgtgattggttaggaagagtatgttggtgtagaagttgttatattttgggacaaatcctaagagctaaaagttattatattttgggatggagggagtacatcttctttctctgcacctctatgccggttagcatatctgatcataatatgcaaaatgaaataatgataaacacaaaccatgccaattaattcctagtatgttgattcttttccttttgtttttggtcaaagcaatcttatgtgaattgcttgcatttagtcaaatgataatacttagaaccacaggtgctaaaacgagcccctgctatgccagtttttctgttggcaatgaacaagctcttctgctatgccatttctgaaccacattcaatcttcccctgttctgttattacttacaccatgtaatatatctgttgcaggctttgctctcaggtgtgactacaaatctgtgattacgaaaccgttgatatagaagagagttttggctcatatgagctacctgcatacccgtaggcaatttgatttgttacttgcaataattaattttgatccccatttcctgctagattaacttttacgagagttggcgtatcgtatgtaatgctgtacttgtaccaatgtatcatttacctcatggacgatgaaactttgtcctcccgccagtttctggtggtataatacagaaagtggaacttccgaatttttttttggttagtttctaaaacaatgttcactgaacagctaataattattcaatttgttattgacaagcctttgcagactgtgttaacttgattgcacattgtaatatgatagtatccatatttccttgtttcatctctttgcagtattgaccagatttttgtttgtttggtcagcttaatgagtgtaagcaccagagtcaagattatttctgttcggtgtatgttatgtaactattctctcgttttctctctttttaaaatctgaggtcaacgttgatccggtcgagaaatcaacttctttttttcacctcataaacagttgcagcatgtccataagaaaatgactcctttttttgtcctcatttcaccttcccgctatttgcagtttttttggccaggttcaatgaatatagttatttgctatgagacaaagcagaggatgccatgccatcaggcttctacctcttggggcccttttcagtgatttggaacctgcaagcttgattgatggttaccccatgcagagggaagagagcaagtgaacaaacaatgacaagcactacaaggcaaatgcaaaatatgtgtattctttttttaaaaagaatatcctagcgacaacagtttcatgtccagggacagggaagaacaaagcaaagaagcgtccccggttcatccctttctttttctcttgcctttttcgtctggggcctggaagcgtcacaattataggcttcaacgagatagttaggcatgtggcattgcaagatggttggcaagtaatccatgtgagcggcaacgaaccacgcgctgtcatgctcacattcacgcaactagccaggatagcattaccagctggagtagcaggttgcaggtagcagttggcaggcaccagcgccggcacaccggccatcctgattccgccggcttccgccctttccaccgccatcctctcgccggccggcctaccgccaagaaagtcatggccatggaggagcttttgccttttagcagctgttcttgtaagtttgtagtttctttaaacaattcagattctaagaatctatatagtcctacgtagaatatagaacatgaactataactcataattttataccagctagtatcaccggttatttctaagaatctcctgctctcttaaacaggattgagacgccgagctatccggtttcactatggctgtgtttagatccaaagtttggatccaaacttcaatccttttctattacatcaacctgtcatacatacaaccaacttttcagttacatcatctccaatttcaaccaaaatccaaactttacgctgaactaaacacagcctatgtaagttcacatgatttttggtttttgaaataaaatcacatgatcagaaggttgctatggtccccagtttacatccagtggtcacatactcacattgtacccctactgtatgttgggcgacttcaggataggatccgttccgttgatcgaatcatggatcaccccccccccccccccccccacaacacaagcccgtgcaatgcatgccaccaaatacgaagagacacaattagtacagttctagatttgccagacaagggccctttcagcatcttgttcctaatctccgcgtcagacatacacattctgttattcttatatcttaatcagacagggcgcagatgggattgcatcatttcgattagttaatttgcaacgattacgactcaggcactactgttgactacagttggttaattttgttgaaaaataataataatttggctggctgttaacactgttttatcgtccttcatgttgggcttgactgaaaacgtgaaacatgatggttttaactggtgtatgctaaaaaataaaaaagcagatgggccgtacagagaaaaacagagcgggaatgaagaaaatttcagagttcggcggccggccgtgcgctcgcgtcaacacgttgtactggccgttgattctgcagattccgcgaatcgtgcggatgctcgccggcgcaacccacctccgccggaatctgcagcatcaacggccagtagcgctccacgtccgaccaaaagcagcatattccacggttcccccgggtcgagatgcccagctggtaggcctattttcttgacaaatttgaattttctggagcacgtcattgtcaagtctcatggacacacaggacatttgaaaaatactaccacaacataactaaatttataaaagaaaatcatattttttgatatactattcttgttgacacaagctcattttttaactttggatgaaaaataaaaagcgtctaaaattgcgtagtaataaccttttcgtcgacgaggcataaatcggctgcacgtgttgctcgccttcgcacgggcggaagcggaaggagacccgcgccgtgtttagttgggggagagaaggagagagagagagggcgagtaaatacggaaacgaagccgcttgctttcggtttcctcctcccccatttccttggattttgcgaggtttcctcttcctccacgctctcgaatccgagcagagaagaagcaccagccggggaaggcacgggaaccctaggttggctgcgccgccgcacgcacgcacccgctccctttcgtgctgctgctgctgctgttgttgccgccgcctgcatcgtccccgatccgccggccagccagctagctagcgagggaggccaggtgaggcgctctcggcgttcgttgcgcgtgtggtgaagtcttcgggtggtggggatcgcgaatgcgggtgggtttgggggaatttctgtgagggtggtggggatgggtttgggggaatttgggtgctgcattgggggttggtttggtgctctgcgtgaatctggtggggatagtgagatcgtggtttgttttggtgctaattcgggagttccgggtcgagtttttaggtgattttctgagctgggggtgaggctttgatgatgggaaataaaagtataagcaactagtgtgttcgatcgctacttttgttggcaatattgagatcataccatgtttctctctctctttttgtgtgtgtgagtttcagtttgtgaacgcctgctaaggagaaaaaaggacttcagagttctcacggttgttttcagatgattatttatcgtgtcactatatgaactaatgtaaatagcttagggagtagaaatcagaatttatgtaaaaactgtttttagcaacacatcctagcagacaagttggagattgacttttacatatttgtcttagtagcaaacgtctccaggagtaaaaatcgatgcaaaatcattattgagtaatttattagtactgtcttcttattcggttactttgttctattggcaggttatactgggctttcctcctgataaactcgttctaaagacattcggtgttgccatagttttccaagtgaactcactatgaaaccggactggtcaattttctccaagtttgaccacaatggagggtacctgcataaattcccaatagattctccaatatctcatgatattggattaggattgatatcacattttggaaccttagtcgagagttcctttcagcatccaaggcatatatgttctacagggaatggagcagttcaggaagcattcagttgcttcaacaagtttgctggtgctttctatttctggctttctagagcatcaaatcccaagattttccacaggttgtcagctattgcaggctcaagttcaagagcctgccagtcgcaaataaagcaagtgacttcttgcatgcagcatttggccggattgcgttttggttctcaagttagagaagagcacgctatacaaattcttttagcaaagcttgctaatgcaacatttgggcgactgtggaacgaggtggaggagcgccatgcctgtaacattcttatgttagctgctgctactgtaccaccatttgaaaacatgtaggttcttctatttatattgtttttgtacttccaatgcctgttccatttggctaattcctgtattttggttttcattctatgtgtactttatcgactgctcatttcttgcatggacaagatcgccgaagatgcttgcagactcaatgacattgggaagagataatggtcgtaccagagaacctgttgatcagcattctttggaggaaaaccattcaggctgtacttgtgttgctgtgccaagaataattttaccagaagacgcaactgaaccaaaaactgggataaagttccctactcttctcgaggataattcaaatccaacttcagaggtatttttcaatcttgtatataattgatctgttctttttttttccttattcatgaatgctgataaatagcttcttgacattgtgttagcaacttagtatttcgaaaataataccacaatgttttattccaaatccataatgttgcttgatcttgacccccttaggcccttaacgagttcaactaacggttaaatttacaggtgctcgtcgggatgggctttagaagcatgcgaataatgagggtcaaaaacctgaatctctatgcctttggattatgtgagtataataaaatgtcatgtttaatattattacttatgaaccttttagcataccacataaacgatgtttctttaggttactaatgttgtattcttgtagatatacaaccagattctatttgcaaaaggctgagcccaaagtatgcttctgttccagtttctgaactgaaggaccacccagatttctatgaagatcttttgaggtgtgcatgctctattcatcttttatgcagatctttcccaggttctggcacttaacacatactatgcagtacttgtgtaacgccaggtgttcatttagtaatttggcagaaattatatggatcattaaaagtattggctgttttatgctagaggttaatgggactattccaaacctgcaatcatttgatgtgcttttgaggacttcatttgagtagttttttgtattctgcataagaaacaagaggaatcttaatttttgccccatctgcattcctttcgctctgatctaacaggtttgtgttgtacctgtcatgttgtacagggaaaatattcatatgacagtcaggctgatagttagctacaatggtcttagcattggcacagtgcgggagtatgtattttagttttcttgtgctaatatcagcacattcttatctttagctgtagttcagaagatacaatctctcaatatgcaagctaatcattttctttaacactcttttcagtgcatttgagaagtccctttgcttccgattgcagaaggtacttgttaattcggcagctaaaaatattcttggctaattatataggtctaaaataatttctctgtaccatttcaaaccagatgaatcctaatactgattatcattgcttgaagacgtttggttcttattttagtgaagatatttgtatacctgcggtaagttccaatattacgtctggcctaacttggtacttctcatcataagatactgaagtcaatatgactgcagggtacaaagatcgacttccggcaaacctctgatggccagctcataactgaaagttagtatcgtatgcctgattggttctgcatggttagaatttttacacctgacaaaaatgttgacatggaacgtctttgtgcagttgatggcaaacaaattggtgctgtccagagcaaagatctttgcagtaagtatatatattcgttctttctaacttccagaaaaaaaaaaagacagaattactgttatctgtcattatttatttggcaaattccttatgctgtctttatgaacaggggctttcttcgatatgtatattggtgatccacctgtttcagtcgagaccaaacaagacattgcacagaatgttggtggactcattagaagatgttattgaaaggcataattaaacgacagactggtcggaattatttcattcttcgatacaaggatactagggtgagggggaagcatatacaaagacaggactaggaggagaggatgaactgtatgtatagtgatagatcaacctgtaaactaaacagagccttagcatctttctccggagcaattgcctccatgcttttcatatgggttggctttggctatttcctggccactgtatcatgtgcaatgatccagccagacaatgtaaaagaatgcttccttcccccatctaaaatgagggacaccagctttgctggtttagattaggccatagtagtggtgctgaatataaattgtgtactagtgttgagattaaacagcaagtagtgtactagtgtcacttttccttgaacatctctctgatgagaaaaagagaaactagcttctagataacccattttgcttgcgaacactgcagaggcccgtaggattacattacagcattgattgaactttctaaaacctaaatccatttcaacataaccataccgttaactgaatattatatcgaagaaaacttgcatttcagaaggaattatgcaagatcagatataaacgaaatgctagctttctaggggcacttttttttggggggggggggcgggggcgggttcagatatgtgcagctctgtagttactctgtcacattggcaaatggcaaggactaatgctaaattttctagaactatatttacagtaccgctcaagaagatactacaaaaacaaaaacttaatcactttacaaaaaaaaacgtgcgaatcaactgtcaattaattctgacatgaacctaagtcgttttcgcctgcgtgacagaaacagagctaacagctaccaccctgaaactgaagagcaattctgggccgaacactttgcagcctcctccctgtctcctgaatccaagcgcgtccctcccttttccctcctccattacacctcctcaatagtcaatacccccatctccttggattgcattgccttctccgtccgtcgcgttgctccggtgctcgatcggtctccccgcccggccgccagacgacgcgccacatatgaagccccgctcctcgcgcgacggccataatgccgccgccgccgccgcgctcctcctcgcggcgctggtcctctccggcgacgtcctgccggcggtcgtggccggtggcgccccctcgttcaactacaaggacgcgctcaccaagtccatcatgttcctcgaggcgcagcgctccggcaagctgccgcccaccaaccgcatcaagtggcgcggcgactccggcatggaagacggcaagctcgccaacgtatacgtcgtctcgcctcgcgccctagctcgaacatctcgctagctgcatcttctaattttgtgaaatggatcactcgatcaggtggacctgactggcgggtactacgacgccggcgacaacgtgaagtacgggctgccgctggcgttcacggtgacgacgctggcgtggacggcgatggcgttcgagaaggagctgaaggcggcgagggagctggagaacgtgcacgcggccatcaggtggggcaccgactacttcctcaaggcggcgaccaagaaggaccacctgtgggtgcaggtcggcgaccccaacgccgaccaccagtgctgggtccgcccggagaacatgcccacgccccgcaccctctaccagatcaacgacaagacccccggctccgagattgccgccgagaccgccgccgccatgaccgcctcctccatggtcttccgcaaggataagccctactcccgccgcctcctcaacaaggccaagctggtacatatatatattcattgattttcatctgttaatttctcttatatagttaatttgcatctaattagctactacctgatgacaaatggaaattcacagctgttccagttcgccaagacgcaccagggaacctacgacggcgagtgccccttctactgctcctactccggctacaacgtacgtctctgcatatgcatgcatgcaaaatttatcaacgtaaaaaatttgacacgttatatatattgtgattgtgactgcatcgatcaggatgagttgctgtgggcggcgacgtggctgtacctggcgacgaagaggcaggtgtacgcggacttcatcgggcacgaggcgatctcgtcgagcgtggccgagttcagctgggacctcaagttcccgggcgcgcaggtgctcctcgcggagctcaacatgacatccagcggcggcctccagagcttcaagtcccaggccgacaacttcgtgtgcgccgtgctcccggacaccccgttccaccaggtgtccatcaccccgggcggcatgatccacctccgcgacggcgccaactcccagtacgtcaccagcacggccttcctcttcgtcgcctacagcgacatcctccgccggatcaaccagccggtgatgtgcggcgcccaggccgtgcagcccgcccgcctcctccagttcgccaagcagcagatcgactacctcctcggcgccaacccgcgcggccgctcctacgtcgtcggcttcggcgtcaacccgcccacgcagccgcaccaccgcggcgcctccaccccggtgctccccccgggctaccaggtcaactgcgggatgagcttcagcgagtggttcacccccgaccggcccaaccccaacgagctcaccggcgcgatcatgggcggccccgacggcggcgacaacttctccgacaagcgtggcaactcgtcctgcaccgagccttgcacgtacatcaactccctctccattggccccctcgccgccctcgccatccgtggcccaaacctcatcgccacccagtaattaatcaccattattatacactgattaattactgctaaattaactaaagatattgagtatattactatattactcctcctcccctgtattaaatctcgacgatatatacaaattaatttgttgattaatcggaatcgaaattagagctgatgcatgcatggacacgtgaggtgatcgatcgggcacacgatcgatcgatgacacgaacgaacaattaataacgcgagaaagggctcgcgcgagttgttggggtaggtctcggctggtcgttaggttggccagcttatttctcgttgcacgcacgcacgcacgtacgtacgcaggcgcgcgcaaccgtgtgtaagtgcgtgtgtgatggatcgatcaaccgagcggcgcgcacgggcgaatacgaacttttccaagtgatgaagtgatcacgtatacacgtagtacagcagccgagcttttcggtgagcgtgtacgacgtgtttttttcattggaccgaacataaaacatgtcaagtacgtacgtggtacgtttggttaatgcataaatgtatttgtggttcttcaaatcccgtgctcaggtatgaattaattaatctagctagctatatggtgtactatcttgtacgaagaagaacatctctgatgctgtatatctttgtgatgtatactacacgcacaataaattatctagtttggtgctatcattttattgtgtccttctcgttttttcaaaattttaatttattcgtaacattgtgtatgatgtgtgaaaactataataattggttgtagcttttattaaagtaaagacccgaattctcattatctaaaaaaaacattgttgatcaatatcttgatatcccctttattatacatcagctttggagagaaggaaaaaaaatacatgtatttatttgacaattggttttctgaattacaaaaggggtccttgtccagttgtcttgaactataaccttccattttttgagttcatttttatcatttctagcacaaataataaattgtactaaatcaaccccatctgcaaccattagatcagtaaccaacaccaccagataatgcctactttaccaacaccactaacaaaaccattaggggaataggtgtacttgtggtaaatgaggcagtgatgcagcgcaaaggcaggtaccaatttatccttacaaaagttaaaatcacaaaggtgggtgaccttgatgaacattagttagcaatgtaccgcaaagaaaacattaggtagcaatgaagacaatcactctcttaataatctatatgttgtttgcacttaagttgtaatgtaagtaactcttggatttaagcatacgttagattctgctgagatagacatatatttattcgaccgagcttagtcaaactatagatgttggaataaaaatgctcgatttattttagaactaactcattggtggatgattgggattggttgtcgatttgtcgtaacgaatttattggattggatgggattggttcaatttcgcttctatgtccaaaattgcatcgtcttctactttaacggtattagcttggcatgttgttatttggcacaactctctattaaagtcgtgtcctttcggctattgggtaccaatctagagtcatgtctcttttcacttgtttaatatataatctctcaaatggagtgcatatcattgtttttctttacgggttatctaaatgtatgagaaattatttaaagctaaaaaaagttcggggcaaatctttacttatatattactactccatctttctttgcacatttgcaaactcaggcagaaaagggaaataaaaaagggaatcaacctgccctccttttgcagcataaatacccaacccatcactccacaaagaaaaaaaaaagccactctctcgcgatttccctagtctttcggtgtgcgtgcgcgtgtgaaggcgagcaagcgagcgaaagcgaaagaagcagcaagcagcaagaggaggaggcggaggcggcctcctttgcatgtgaggagagagaggaggtgaggtgaggggggccatgtcgatcgcactggagagtgggcccgggctaggaggaggaggagggggcggcggcgggccccggttcggccgcgtcgcccgctgcgcctacgccgcctcgccgccgccggcgtcggtgggggcgcgcagctcgtcgtcggtggggagggacagcgacagccccgcggcggcggccaagtgggagtgggacggcgaggaggtggagggcggcgacggcgaggtgcagagctcgtacaaggggcccttcgacaccatggacgcgctccaggaggccctccccttcaggtatggctggcttcccctccccgcccaattcgtcgttacccccacggatcttgatcggtcccgaggtgttcttgcgtttcgtttgggtgatttgggggtaatgcggggtagaaaccgctgttcttgatcccccggtgcgcgtgttcctctagagagatttcgggggtttcttgattcgtttggaccaatgcagtggaaaatactggttcttgatcggttttagttggggaatgtaggcaagattcttggttcttcgtggacggttagtggtcatggagtaatttgtatggagcggtttggttatctatccttgagtcgatgcttatcttggaatttgggggatttattggtcggactgaagtcaaactgttaaaagaaagaaagaaagaaagaaagagctaatttagggttctaggtgattctttgtgccgccttacatccaacaaatttgtgaacatgggtttcgatcgattcgtgaagctgggatatttgaggtcggaagaatacagcgaatgcactggatgccgggatacttttgcgtatggtttcgtcatgcttgcttattgttggttcatgtttgggttatacccataacccattaggggtcgattatatttttgtaagtagtagtccttaatgttcttgccatgcccttaaaatctttatgctgaatgttctgagcacgaaaggttctgattagacaatttctaatgcgtttgtataggcttcagcaagaatgacttgtgattagtactactttgttggtgtttcacttcattcttactccgaggaatcaaaggatcctagcacttgaatatttcatttgaagtccatgccatcttataatttcagaagggcacattagttgtactaacactgaaagaccaatttccatgattcatagttcctttggtatgtgttgatacttgatattgactatataagcgcagtattatgggatgaaatcacacaaaacgggttttatcagaattacaaaaagttctatggtgtattaatggttgggtttctttgttaatgatcaatacaatagatggtgtaaattgcagatatgtgcatctttgacaaaagcaatgaataatctatcttctaggttggtcgtagtaatgactttgagtttgttcgtttgtgttcttgcaacctgactattgtgtacagggggggtaggcatagctctgagatcagttgatgcatattaccttcaggcagtaatatttttgtcatgaagatatcatgaattgttataatttttgcatagggacattttttttttcttttgagcatgcacaactactgtacaatttcgctactgctatttgaattctttcagtactagtgtaagtctagcacaactacttagtagctgagtgggtttgtagttcatactaccaagtacctattggcccttgtcacttgtagtcgcatagaattgtgcattctagccatatgatggaagcagagattgggtattgtgaacttgaagtcttgaacacaattcaatatggctaacatgattaacacaggaacaggatcagtcagacaccacaatctttttcacatgcttttgttagctatcttgtagcatgtgtaattatttgttgatctgcaacattaaaatattccgcagcctgtctctatcgttgatctggcaaacttgtttgtctgttccttgtgaggagcatgtgtactgctgatgttttccaagtctttgctccagcatcttacaatcttctgttttattgagtaattctgttcttatctattgcaggaaaggggtatgcaagttctacaatggcaagtctggatcttttgcaaagcttcaagattccgtgatcccatctccacctgagaaaagtcttccaaagccagaaaacccatcccctaggaagcggaaaggtcttcttccgttcagtttcaagtggggcaagccacagaacaaagaggtattccctgaagatgatgtgatcatcagccctacaaattgcaggagaatgacattgtcaccagctgcaacaagcagttcggggagcaacagcggcagtgatgatgaacactaccgctctccgaagctgcatacccgtcagccactccgaaggcccagcaatgccgccatgggtgtctttgcttctccacctgcacctcgtccaccgcaggtgttatcagctcatatgagatcacactcgatgcttgatctgcaggatgtgacagagtcgaccgccatggtttctcccagggacaagcgaaggaggaactaggaagggtggatcttgatgtgttgtcggtctggtccaaccgctggtgcccattttagactgcggaatccagtggcgaatgccgtcgtggtggtagggcgcgtgcaatgctttaggggggtggggggtgttttgcgaggtcaaatggactcgtattcatagagcttgctgttctccttatacttgatgtactgggatacatacagagaacctgagaaactgatgtcgttacctgagttggtgggctgcatgcgttgattacaggttgacttgtaaatgctgaactctgcttttgtcgattataattcaatcatgtggcctgctctattacattttgtatacctctctgatctgtggtatctcacccttggaactgtatcagtatgcatattatgtcctgagctgttggtgttcttctgttgctagtacaactgtacaagtagcagcaacctcttccgatgaacttatctgtgcagatccatcacttttttttttagaacatgcagatccatcacatagttttggataaatcattctgctcttatgggtactggtgtgcaaagcgcaaggattttgtttttttggcagaagataatctattgcagtacacacgcagattgtgtgaacgccttggcaaatcctgttggtcggtttcgtactttcatcttctgttttcgtgttcggaagagattgcagtggctgtgcagccgcagcagctccatcaaacgcaacaaaatttctacggctttgtactgtagatacagcccagctgcgccacagccgagcaagctgcaaagcagcacaagcgatttggtggcacatgattgctgctctcgttaatctgacgccttcggtaatcggaacctcccactcacagctgaaatttgttgttttctctatgcgtagatcaaaactgatctttcatatttgtgtaaggacatttaagacctacttcactttgtattatttaatttttataagattttagttaactatttggaccacatggactaaatcttaaagcccacaaatcttgataaggcaaaattgtataaagcaccccaattatcactcgttttaaaatctcctcccttaaaaaattcaattcgttgcaaaggcccacccaaccaaaccccttcacatgaatataaagtcagcccgaccccgctgatgtgtagtcgcaacaggggaacagagcttgaccttagctactctctctgtcccaaacagggacggagccagcattttgaatcactggggtcatggcttttacttgtatttatgtcgtgtttgaaactataattattctcgaagctagatatttttagctcacttttgagctagagctatgagtaagttgggattgttccattttgctaaaaataaatatttaaagtctattctataagaacttctgaggtttttaaggtccaaaattttaaaagttatgactacatataaccgggcataacaaccatgtgttttttcagacatacaagtatgttctgaaagttgtttattattccatctgtctcaaaatacaactacctacgtctttttaagagattaatgttagggtgtgaaattattgtgattggttgggaaaaaaaagtaggtgaaaaaaattatatcgaggaattttgtgattggagatgggatggttcatagaaaatagctatattttaaagcaaatttgaatattagaagtaacatattttgagatagagtgagtaacttaaaaaacacatctagtagttgattagcaaaacttcaggcctaatgcattgatatacatagcacatagctaaaataagtagttggttaatagatcaaatatgtctaattgcagcattagtagcggattgacagtagcataacacagctaacaaattatgcttccaaagaaataaacggtacaattgtttcagccttcctgagctccagcagtttatcaggctggccggggtcattaagcttttgttgctggggtcattagctacaaaataatgaacaattcacttgattgatcgaatgtcatcagggtctaatgaccccaatgatagtactgcagctccgcccctgatcccaaaatataagcatttttagctatgaatctggataactgtacatttagatttatagccaaaagttattatattttaggacggatgtagtaattgcctatactgattcgccgctaccctcagccctcgcgttgttcgagaccgtcttctctctttgatctacacctaggactaggttcaaatggatgcacctgaaaccaaacgtgacccattggtctggtcttttacgggtacaagtcacgggctgactcagctatttacacacgtggagggtttgggtgggtgggtttttgcaacaaattggttttactagaactttaggcgcgcttcgggccgccctaccgtttgttattggtaaaaagtatcacaagtcagaatatgtatgtacttatattggtaaatgttgagtacgaaaggacttcattctagcacaggctgtgacataacttgaattccgatgttacatgatgatttgaaatagaccctgaatactataagataaaaaatacctaataatttcagaaaccacaattatttatcatacccaaaagagcaagaaaaggtataataatgtacttaaaaaacggtttaatcattcatcctcttttaaaagaggttaattcagttccattacggggcatgaatcacaagttgtaatgtgaaggactgtgtttgcaatcacttaagaaaataaatattcttcaatcgcacatggggactctcagaatttgtatgcaccaggtttctggttttcgttgcttgcaaaattaagttgctagcaatcctggaagctgagtagacactttactggtgtgcacgcgcgcacgtttaatgtgacatggagattattacaggcagcacactgtggaaatggcagagttaggtataatggtaaatccctttttccagaattatcagctaaaatccactgctagatgctccctcaatcataccagcttacaaaaaacgtctttcggactaatctctgcttgaatatctggtatttggtacataggcctaagaaaaaaatcagagagaattgtccatgttctgatttgtgattctgacttctgcagttactaaacataatccaaacaaaaaagaaaatattttctatgttctgtaatttgagtcttaattcagattagattgacctgaaatctaaagaggtcatgaatattcagattttgcatttgattctctgagattatatcaaacagctagatgacaccttaaaaaacacaatgaagcagaaccatccaaaccctgtcctgaccacctccttaaaatatgtaatggagcagagcgacccacagtggtttcatgaagtgaacatctaagctttggttgttggaactatatacaaacacaaccaaataaaaagatatgcagtacaaatcagaaatactgtagcattcttgataaaaaaaaagggtagactatcatttgcaagggaataatggtatatgaaaaagcaaagctagcgagggaactggaggcaggaaagggaagatacatgccaagcatacataagtgagtgtagaaaggaactggttgtggcttaactcaccaaaattgaccatgggaaacaaactgcaaatggaccctgggcaaggcaacaacacatggttccaatatcaccagatatggaatcgctaaacagtggtggtgccgcacggccgacggagcttcaagctaaccaacacctacaatattggcaaacttgagcaccttctatggcagcaaccaatcctttttatacagataagacaaaatcaattatcatatttgatattcatatttataattagattgcattctttttctcttttttgaaaaaagattccacttatctagtgaccaacacttcaaagtatcacctagagtagaaggcaaactgaagagaaaaacattgattttaacaatctttcaccttcttgtacatagaaacacaactgtgatgtacattaatcaacgttttcattagccgatgaggacggtaattttaacagagctaggatgatgcaaaataaatggctcagcaaaaaagagtaagttgtgttttctaggcaagaagttttttggatttaaatcaacagcaactatgaaattgtaagtcccttaaatataattgcatgaaagcacataaaccatttcttgcatacttaattaaactcctactttgaaacattgatatggtgctctgcaatagttctttcaatcttgcaactaatgtcaagcaactttgttatggccttcttgttccatgattcaggtggccttgtaatgctagtatatgaccttcccatcgagaaaatacttagttaatgaggaagaatatccaaagtaagaccaatttcagaatatcaattagacatctaaatgaggccatatgataaagtgcgtgcagtaaaagaggatttctttttttatcatattaacaaatgatctgtacaggtgctacagcctctaatcctcccatgaatagtttagcttaattagtttattctactgtgcacccatggtaaatttttagaaaggctaaatatcacgtcaacagtgaacattagaacagtcactgacagttgcaataacatggagtatgtgcatgaggatagctaaggataatggatttaggacaaggttctatgaaccatcacatgatgttcatgtgaacaaatgcacgtaagttcctattatgctgcatcgaaaaaggcaagaagcaacagaagaacttggaaatctggaagaagcaaagaaaataaaggcaaaggcaacagaagaagatcacctgttcaaaaatatgaaatgtcatcccaattgccttgtggaggtagcaacaaatagacactcaacatttagtcatgaaatcaatggcatcttgcttcacagcgtcctatcatttattgagagcaatataaaccagaagtatatattgtactaatataaattgaagagtaccataacaaactttatatgcccacgatcatatctatgactgtacataacaatgctattcaaacctgaagaaaaatcagacattcatgataaggctcatagtatcctctagaatcagatcaagtccaaagatagtcattcagatcaatcgataatttttttgattaatttcaattgtaagtggtcagctcaaagtgtcacagcatttacatcattcaatattaagttctggaggtcttcattccaacacagattgtcacaacacctgaattctgacatttgtgtcacttttaggaatagtggttgaattcttcaagatagaaatcactaaagagttagttcagaaattatgaaaacttatcatgcttaacagagaaagacatatcaatgtatataatcaaagatgattttagtgagattcagtttctttaaaaaaagctaatttagttccatcatatgcaaaactaaatttatatgttgcatctcgtgtagctgaaagcatgaataccaagatagaagcatccgcttatgtgaatgaagataaaggaatttatagaacaaccttcgctaagaataattcccaagaaactaaatgatttctagatttggcaatagaacggtcagttgatcatccaaaatactcctcaaagaactaaatgtggcatccaaaactcttctttcactcaaaagaaaaagataatacatctattgaaatataatgtgagaagtaatcagttaaactaccgtagatgtgggtgtcctaaagagtatgtggccacaaaatctgacatcatgttcacaaatttctaaagattgggtataaaatgatacatcttaaactgcaatgcaactgcttagcatagtataagatgagaaagcatagccacaaggttgctagatagccaaatctacttcacatattaggaagaaacatgccccctatagttttgacatacctgagcaccatatatggtagcaaccaaccctttttacatgaataagacaaaaggagtcatcagatttgatatttataataggatgcacttattactctctaaaaaaaggttccacttatctacatgcataacaatacctttgtagagaataaattatatccgatgaagagctatagaaatacaatgcatatttaagctgaaaggagcatagaggacacatacacattaacaacgtacaacacccactaaacctctttgattacatcaagccactgaattatcagttataatctccctcaatcatacaagcttacaaagaatgtttttcagactaatatctgcttgaatatctggtattcggtgcacaatcccaagccaaaaataaaacacagagaaattttcttgttctgatttgtgattcggacttctgcagtcgatctacacatgcggctgttcttcgttcgcgtcattgtgaagcaatcaagcagtagcatcatattgtccacatcgtcgtcgccgatctggagggcatggccgacccgatctccaccagcaccccaacgtcgttggtaggccgcgccgcccgctggtcgtcggcctcacctggtgcgaggtcgccccgacgctgccggtgccatctccatcaagctccgccggcgtcgtcaaggtcgtcgcggcgtcatcggtgcggcacagggtacgagggaacccgtccctaccggctcctcctctgcggccgccgccgcctggggagctcgtgcccgccgcagccgcctacgcctgcaggccgccggttcaccgtcgatgcatcctccgccatccacgctgccgcccggatctggatgtcatcgtcgttgcggtcaatcccatctcgccgagctccggcctcgccgtcgtcaccatctccacccggccggatgacgccggcacctgcctcgccgtctcctgtgccgctgcggggggactcgcctccaccgccgacgtgtgcgggtcgccgctgcccggattcctcgctgcccctcctgggactccacgatgggcgcccgccggtctccgccgcgttgctcccggcggcgccccgacaccgccgccgcaggggggacggattccgccctcaccgagcacgagctccctccaccgcctcccgccgtccgccgcctcccgccatctgccttgctgcgccggcgccctccgtcggcccgatgcctctggctcctctcataatctcccaaatcaagcgtcggggccagaagatcgatccccacgccatcaatctccatcacagcatcctcggagctagcgcagcaccatccaatcccctgcttgacctcacagagagaggaagagaagggagcaaaggtggggggagcgccaggagcccaggagatggaggaaggcgggggagagcgcgagggatgtcatctgcgatgaggagaagcgggtgagggggagggaagacgatgcagcaccggcggcgccgcaaaggcaggggaagagcaatcgagagaagggtggggtacaatggcggctagggtttcggagaagcgaggggatggaggatggggatgttttcttttgcaagaaaaccctcttactttcttgttttagagcgcgccccctatattcggaatttcttctctttcacatataataataccagtatatagaggaccactacgtaagaatataaaatacagagaagtatgaccaggcagttaggaatgattatcaaagaaagtgagggtttttttgcaaaattgccagctctagcacagggtgacgtggatatcaccggaagcgaacacgccagccaaaaaagccccggagcgctgtggtggctctatttcgcggtcccctttaatctctccgatttaatctctccgatggtggaattttaaaacaagagtgataattgagatggtttataaatttttatctccggatagtgatactatgtgtcaatatataaatagttttcagacacgtgaatacaattacgatgacgatgatatccaatcacaggctctacctactaaaaatctgcttaccaaccagtacgaggcgtatatttcatactccctccgtctcataatataagagatttcgagtttttaattgcaacgtttgaccactcgtcttattcaaattttttttacaaatataaaaaatgaaaagttgtgtttaaagtactgtagataataaagtaagtcataaataaaataaataatatttttaaaaaattttgaataagatgagtggtcaaacgttacaagcaaaaaattaaaatctcttatattatgggacggagggagtatatttgcatggtatcagtgacacatagtactagaacaaaaataattgaatccctcgcacagataggcaaaccctgcagtaagttgtatatattcggctgccctggcctccccactacctccccacagatgacagaatagctcatcaaacctaagtttaattaattgccaacattctcatggtcatcaaaccaatgggcaaaccactcgtagtcatactcttgctatcctcctccctcctcgccgttgcagctgctgcagcatcgccgccgtcatcaacagcagcaggccatgcaggcgagccagacgacgacgttgtgtccacctacatcgtgcacgtcatgcccgcacacgcgccacgccgccttcccacgcaccgcgcgtctcgtcgtctcacccgcggctacgcatcgctcgtccgcgggctcctcccgcggcacatcgccgacccggctccgcgactcctctactcctacgcgcacgccgcgacggggttcgcggcgcgcctcacggcacggcaggccgcgcacctcgaggcgcagccttccatcgcggccgttgtccgcgatacggcctatcagctccacaccacatggtcctccgactttctcaacctctcgccgtcttttgggctacaggcggagtccaacggcgccgtagacgcggtgattggtgtcatagacacgggtatatatccgaaagaccgtgcgtcctttgcacctgacccatctctgcccccaacaccgcctcccaccttccgtggtagttgcgtgtcgtcgtttcgtgattccaatgccagcgcttactgcaacaacaagcttgtgggagcaaagacgttctaccggggatacgaggcacaaaatgggccaatagatgagagggtgcagaccaagtcaccgctagaccaggaatcctaattgacgcgtacgcgccggcccacacggcccaagacatggttagttcttttttccgaattttttcatatatgtataagcttttaacccatatttgaatactttcaactctgacttaaaaactttcaactcagattcgaaaactttcaactcgagattcgaaaactttcaaatcagatttaaaaattttcaaaagttataattaaaaaactttcaactcaaaacattttgaaaaaaaaatacgtgtgctaaagattttaaaaaagtaatcagaaaaaaagaaaaaaaaagctaaaagaaaaaataaaaaaaaacgaaaaaaaaatcgcgaataaaaaaaaaggccgatgggccttgtgggctgggggaggggggggcagctggcgcgcgcgcgtcagctagcaaccccccgctagacaccataggtcatggcactcatacttcttccactacagtcatgctgtcccgaatgccaacctctttggtttggccaatgggattgccaagggcacggccccaggtgtgcgtatagccatgtacaaggtatgttgggaatattacatacccgaatgcattaccactgacatccttgcggccttagatgagacgattgctgatggcgttgatgtcatctccatctcacttggtaggcccggctaaattttatctctatatttatttaacaaacgtgatgattaggagagacgatatatccgaagatattgagaaattttcacctgataataatgcagccactaggctcaagtaatcactgctagtgtactactcacggtcacatacatgggcaataacacacgacaactcgtctctttggccagttcatgtcgttgtttcttcgcgtcaggggagcaaaaagtcattagctgttcacgttcaaaatactcgaacaagcgagtgccatggatttttcgttggttcgttgtcagttcgaaaggattacaacgagtagaggcgcgcacattcgtgccttcatttttcgttggcttttactgtagcaacagagatagattgacaagcacgtaaaattaattctgatgcgcgagtccatttcaattctaacttagggcgactcgttttcacacgagtaattaacttagggccagatatcctcgtccctgcgagtcaatttcatcgtatcgcgcactgtagattgtaccgaggattgcaaccacagcgaccaatggagggctgcgtagcattttccatctgcaattgacacgcatgaaaaatcccactatcagatcatcaatccgacgggtccagtaataccaacctgcctgtcagctagctatgaatgattattattccaagcacgtgtttatttgcgtcatatcgcatcaaataatattagtgaatgattgaatttggcgatgcggatgggggaatatcaaaaagaaaaaaaaatgctaaatatctgctacctccgtaccataaaaaacgaatctaaaatcggatgtgacatatcctagtactataaatctaaacatatgtatgtccagattcgtattattaagatatgtcacattcaatactatgttggttttttatgggacggagggaatagctgtagaattttcccattaagagtttgtaacatgacgacctataaatctacatgctccctggttaatctacaatgagattgtgaacaatgacatactcccatgtcgtatttctcggtgatctgggaagcaaaggcacgtctcccccacctcatcagcgcggctcgcctgcctcgccaccgccgacaacgctgccccctgcggtggtggccggcggctgcatcgtcccctccttcctcccctttcctccctctctcttcctttccccttcttccttccctatctttctcatttcctctttttctccagatttgaggtgactcatgtggacgtcggtcctgagcttggctctcctccccacgtccgacgccaacggcctcccatcccgggctagcggctgcgttgaagatggtgggggggacggtcagatctggccaccctaggtctagatctggcgtctctctgatgggatctaggtttctctctggtgcgagaggccagatcccctgttgcgatgatggccagcggtgctagtgatggcagtgagggggacagttcgatctggtccctctccaggtctggcacgtcccagggtcgggtgaggccgtctgtttagccatgtatttgtaatataatagattgtaacgtgtactaaccacgaagataacgagttgtgtgcaatgtaccatgtttgattggaacactaatgtggccttctgccatcatcgtgcataggagcggatctaataagacataacatgtgggactgaacaaacttgaaaaactttagcccggtccttttctatggatgtatgacaaaaggaagatagggcttatatggaggctcttatagtcccaacgtcaaaagtaagggctcgagcccctctgtccctatgatagatccgtccctgttgtgcacctcaagcgtcggaatgccatcgatggtgaattctagtcatcctttggagtaaaggatttttacgggaattgactgatttgtatgagaataatacaaaattgatgtgttgcaaagaagccctccacctttgaagacggacgtgattgatggctagatcaaatttcacaatgttttttaatagtataacaaaagcagataatataaggtcaagggaatacctaagcctttagcatcaagtcttggaacaaaaaatatttgaacggttctatttgaggcaccaatttagaatgtataatagaagatattgccatccaaattaaaagaaagtctaaatacacccgtgaattgcaggtaatgtcctgctttttgtcaattctgctttagggcattcccaacccaatgactaggatgatgtccatagcattaaataagttaccacctaggataaaaaataatgtggcaagtgaataaatgaggaaagagaaggaaatcatgtcttgcatgagacatggtttctacacaatatccaagacatcatgtgagataaatagcattaaattgaagtatggaatagtggtgtttgcattggaagagtagtgtctagtactagtttcttgatgatgtggagtttatgaaaaccatgtctagtgttatgggttgggattgcccttagccttactccctcctttccaaaagataagctgcccacaattttagaaaaaataacatttgtaactattaactaatagtaagctaataatatgtatatgtagaaacatgcatatcatatctttagattcatattttaaaatagtttcatataatgttaatattaattatcgataatatattgtgaaagaaattaacgtttaaaatataatataaaaaatacgcatgtcttgtagtttggaacgaaggtgaagggagtacaaacaactctgtggactaagcacattacacacaccaccgtcattacttgtcttactagccagaggccttccaaggccggtaagatgtataaatttgcttggccctcgcctcccactgatctccacacacaagaactcactaaaccgcttaattactaccaacatttgcatcactgcatgatcaccccaatggccaaaccaccagcaacaacaacgctcgtcctatgctgccatctcgccgtggctgccgcagcagcagcgacatggataggacatgacgatcagcaagacgacgacgtgtccacctacatcgtgcacgtcatgcccgcgcacgcgccacgcctcgccacgcaccgcatcgcccgcgaccactacgcccccttcctccgcgagctcctcctccccccgcacgtcgcccgcccgccgccgcgcctcctctactcctacgcgcacgccgcgacggggttcgcggcgcggctgacggcgcggcaggccgcgcacctcgaggcgcacccctgcgtcgccgccgtggtccgcgacgaggcctacgagctccacaccaccctctcctcctcgttcctccgcctctcgccgtcttccgggctacaggcggagtcgaacagtgccaccgatgcggtgatcgctgtcatcaacagtaccatgcgtccttcgtatcagacccgtctttgtccccaacaccgcctcctacctttcgtggcgaatgtgtgtcgactccagagtttgatgctagcatctactgtaacaacaagcttgtgggtgcaaagatgttctacgaggggtacgagcgtgcgagtgggaaaccgatcaacgagacggaggattccaagtcgccactagacacgacgggtcatggcacccacagcgctgccattgcagctggctctcctgtgtcggatgccaacctctttggccttgccaatggcgttgccaagggcacggctcccggtgcacgcatcgccgtctacaaagtgtgctggaaaatggggtgcttcggctccgacgtcgtcgccggcatggacgaggcgatcgccgacggcgtcgacgtcatctccctctcgctggctgtcaaccgcaaaagaacttttgctcaagatcccacggccattagcggcttcaatgctgtccgtaagggcatagttgttgttgcatccgctggtagcggcggtccaaaggaatcaaccgtcaccaacacggcgccatggttgttgacagtcggtgcatcgagcatgaaccgccaattccagacgatcgttgtgctcggcgatggccagacattttctggcacatcgctctatctcggcgatacagatggctccatgaaatcgcttgtctttggtggtttcgccggctcagccgcttgtgaaatcgggaaacttgatgctaccaaagtcgctggcaagattgtcctgtgcgaggcaggacaggtcttggatgcggagaaaggagtcgccgttgctcaggctggtggattcggtgtcatcgtgtctagtcgtagtagttatggtgagtatgctaaggccactgcccatctcaacccaggcaccacggtgcctaacgctgccgcattggagatcttgcgatacatggccaggacaccatatccagttggtaagatcctcttctttggcacggtgctcagctcgtcgccgaggatcgcgtccttctccgcccgtggcccgagcctcgccgcgccggagatcctcaagcccgaccttgtcgcccccggcgtcagcatcctcgccgcgtggtccggcctcgtctcgccaaccgaactcgacgtcgacacgaggcgcgtcaagttcaacatcttgtccggtacatccgccgcgtgcccgcacgtgagcggcgtcgctgcgctgcgcaagatggcacggccaagctggatccctgcgatgatcatgtcggccctgacgacgacggcgtacgtccaggacagctccggcaatgccatcgctgacatggccacgggcaagccggccgggccgttcgagctcgggccggccatgtcgacccgaacagcggccttgacccggggctcgtctacgacgccggcgtcgacgactacctcgacgtcctgtgcgcgctcggctactccgacgaggatatcgtcggtatcttcttgagggacggaacgatcaccaactgttcgacgcgggcgagcaccaccgtggcggacctgaaccgcgcgtccatctcggtggcggtcaaggcgtacggcgacgatatcacggtgcgacgcaccgtgcgcaacgtcggcggcagcgtcgacgccgtgtacaccgtcggcggggtgccaccgccgggcacgcagctccgcatcaggccgtcgaagctggtgttcgacgcggagcaccagacgaggacgtacgacgtcgtcatccgcacggtgtcctccggcagcttcgacgagtacacgcacggttccatcgtctggagcgacggcgcgcacaaggtgaggagccccatcgccgtcacctggccgccgtctcagagcgccgccgtcgcggccatttgatcgagcagctgctctaaccctctcgatcaatacgcatgcatgatctggctacgatgtccatctagtttacagctttgctttgcagtgtgtaatgtttttttccgaataagcagcttgctgcttcctcgctagtacaataatcccggtgtggtgtaatcctacacttttgtatcgtgcatgcatgataaataaaatcgagaatatatatcaataaatcaatggagtattcagccgaattatactgttcaagtaactattccaacactttgtttgcttagttacgttattacaactttgcaaaaatcaagcatgaaagcaatttttttttaaaaaaaagcgtacgttctgaaaatgcgggtaccagctcaatgtcttgcaagcataaaagagttaaaagacaataaactgaacccaagaaataaatgcatggtaccatatggtccagcctagaagcaacacagataatggcagcctacccaacatttatttgctagtaatacactatttctcccaccgtttcaaattattgcattctagttttatcttgaatcgatcatttgtatatctgtccatcaattgttaataaattgatagtttaccgcgagaataactttcatattatttatattttgcatgttgttgaattcgacaaatttatattgtcaatgataaaaatgtttgtgtcgtgacccaaggtcatggacaagattagggatagacgggaaaacacccttttcccgcctatcctgagaaatgagcccgaatacaaaataaacacacacttttactgacaagatttttagtattccaatatgtcctgtctgctacaggtttttttgtcagccttatatagttcatagatttacatatgagattacaattgtgcccttcgttgggcccacatgaaattacaatcgtgcccatgccatatgagcaaactctaagggcattttggtacattataggggtcattatagtttttggtgccagctagatggagtggttgagtggttcccaggaatattctcttggcatctttattgtccaagttgccttcttcatgaccaagagtcttttccatcaccatgggtcttctccacgaccgagggtcttttccaccaccatgggttttctccacgaccgagggtcttttccaccaccatgggtcttttccatggcatgtagtcttttccatctcgatcatcctttccgatttacctggtagctgacctgttattaacttaggaaatacccaaaacggataatgagacttagtgagaagaactcactcgaacggtattttccgactcgaacagtgttttccaactcgaatggcattttaccgttttccctattcgaatgaccctttgccactaggatacttatgataaaaactcaatcttacccaatctcttcctctatagtgttttgggccgaatatggagggacggtggtgaccccttgctacaacagtttgatttatggtaaaactagaatgacaagtaatttgaaatgaagggaattacatcttattcagtacacctatctgatgaaatgaagtctaataacttctagcatgggaatccaggtaatttagcataaataaaattattcaccactccaatccagtgagttacacatgtgcatagcgatgaacaggcaaccgatcccttccatgaagccatgggagcactaagcttcatggaaggatttggtctcatgcgtggagatctctgtccaagaaggacctatacaagctgtccccattgccaccaaaccagaagacacccaaatttccaacactactctacatggatgctgctcggccgttcgacggccatgtcacggcgatggggctagtgacgtcgtgcacgccgtcgctccaggtgaccgacccgaaggtgtactcggtgtcgacgatcaccgggttacccgacgcggcgatggtgatgtcgtaggacaggctctggtggctctcgtcgaacaccagcttgcttgggctcaccgtgacatccacaccggacgggctgtcgatcttggcttcgtagacggcattggcgttgctgccgacgttgcgcaccaccctgtggtaggtgactgaatctttgtaggaggataggacgacggcgaaggcggggtagttgaggtccccggtgcgggggaatttcgtcgaacagttggcgacggagccgtctgttgtgaagagggagatgatggagggggagtagccgagcgtgcagaggaaggagacgtagtcttcggtcccggcgtcgtacacgaggccagggtcgagcgcgcggttggggtcgacgtggccggcgccacggacgaacggcgtcgactcggtcccggtagccaggtccttgatgaccgcgctggagttgtccacgttgtacgccgtggtcatgagcgccgacttgatcgccgccgggctccagtccggttgcgcctggcggagcagcgcggcgaggccgctgacgtgcgggcacgacatggacgtgccggagatgatgttgaactccacgcgcctcgggtcgatgtcgaggtcggtgggcgcagactcgccggtccacgccgcgaggatgttgacgccgggggcaatgacgtccggcttgaggatctccggcgcgcggtagttggggccccggctcgagaacgccgcgacgcgcggcgcggacggcgacttcccgatgaccgtgccccggaacacgatggtcgccgtcggcgacggatcgctctggacgtagtacttgatcttgtcgccgaatttctgccccaccattgtcgccgggacgaggtgggagtcggcaaccagctcctcgccgctctccgccgtgttcaccagaatcatgccggcaccgccggccaccttcactgccccgcctttcgccacacgggcgttgctcccacgctcacacagaacgatcttgccggaaaccttcgctggatcgagctcgccgattatgcaaagccgagacccgcagtcgccggcgtacaccaccgggagcagtgtggagttcaggggttcgccggagtacagggacacgccgccgtagacctgaccgttgcctagaaccacatcagccgggaattcgcggtcgatggtagatgcgccgacggtcagtatccatggcgcgatgttcgtcgcggtgtactcgccggggccggagttgccggcggacgcggacaccacgatgcccttgctaacggcgtggaaggagccgatggcgatggagtcgcggaagaagctcggggcgtagccgccggcgccgacggagagggatatgacgtcgacgccgtccgcgacggcctcgtccatggcggcgaggatgtcggagtcgtagcaaccggacttccagcagatcttgtacgcggcgatgtgcgccgcgggggacatgcccaccgcctggccacgcgcgtagtcgaagaacccggcgccggtcaccggcgaccctgcggcggtggaggcggtgtgggtcccgtggccctcggtgtccagtggcgacttggactcctccgtctcatcgatggcgtggccgagagcagcctcgtatcccttgtagaagaactttgcgccgatgagcttgttgttgcagtaggcggaggcgttgaaggaggcggtggagacgcatccgccggagaaggacgcgggcggcgggccgagcccgtcggtgggcgcgaaggagccgcggccgatggggtagatcccggtgtcgagcaccccgacgatgggtgacgacgcgccaccggaggcggcggcgggcaggagcccggaagcctgggtaaggtggaggaacgccggggtatgggtggtgtgcagctggcgcgcctggtcggggtggacggcgagcaccccaggctgcgcctcgacgtgcgccgcctgttcgggggtgaggcgcgccgcgacccccgtcgctgcgtgcgcgtaggagtagagcaaccgtggccgcggtgcgcgcagatggcgcgggaggcgaaggaggcggccgaggaacacggcgccgccgccgccgccgacgcgcgtggccctgagcgccgggtgctcgggcgcgaggtggaggatgtacgtcgactgctctctcgcggccgccgccgccggcgacgcggcggcgaagaggatgaggagcacggcggcgagatggcggagggtagccatggcgcaccgggggagcggattggattggtcgatgactcgacgccaatgcggcctggagaactaaataagtggtgggccctttcaccgggtctggatctggattggccaatggcgatgccggcgtgggctcgtgggattctttacccgttcggtcgtcgggttacttttgcggcatcggattggacacgtcgggcctcacaagtctaagtatctcatttttatcgattttttctccggtttatccgtgactgctgctccagtttaggaccagtttcgtgctcgttttcatcaggatgtactctcactccgtccatagaaactccattttcagtctttgatataacgtttgagtttttgttttatttaaacgttttaaaattagtatttttgttattattagataataaaatataaatagtattttgcgcgtgactaatttttctaattttcttataaatttttaaaataaaatagacggtcaaatgttaaactcacaaacctacaagtggggtttttgtgagtagtactccctatgtctcaaaaagaaaatctaggattggatgtgacacaccgtagtactattaatttctaccccctccgttccataatatataaacttagaaccgaatgggacacttcatagtacaacgaatccaaacatgttgtccagattcgttgtgctatgaattttctcatccggtcttaggtttctatattagagcaagtttaatagtatagtccactactacctccaattcatctatagccgatttaatagctatttcatacaataattgcttactatactattaatgtatgaccccacctgtcatacacactctgcttcttggagtccgtgctgcagctagctacatatctatagcccgctgctcttctctctcattttttatctcattaaaatatgtttatagttggctaatagtatgctattgtacctgctcttatgggacggatggagtattaatttagacagatatactttcagatttatagtattgatatgtgccacatttgatattagtttggttttatatgtccgttacatagaaaattacttaaagtgaatgggacaccatacaatgtatctggacatatgtccattttcatgtccactgcaagcaacggcaacaaattcagtggtgacagcggcgacggatttttctccttgtcactatgccaccttgttgtcaccggcaatctaccgcgatctatcatcaatagtccaggcgtagttgggaagaaacaccggatgtcgagttcaggcaatagcgtttctgctcttcccaagcgacatccgtgctgcacgatcttcacacgcagaagcgttgctgcgccacatgcttcgtcgccgtatatcttctccgcaagcgcaccaagttttagaatttttttattaaaatatttacaaaaatagtttttagttttgaaaatttacaaatttaatcgcctgccgccttttgggatttttaaaaatcgcccttccaaaaggcggcaagggatctaaatgtaaatttttcagcacaacttgttagctctatgattttacaatttaaaattatattatataaagtcagatgaaataaaactttatatcaaaattatagatctcaatgagatctacaactttttagttaacaaatttttcatttaagatgttttagatatccaaatattcgttacaaaatataaaacacatttaaaaaaatctcagatctacatttcaaacgacattggatggagataaactttatataaaagttgtagatcttgatgagatctataactttgtaatttatcactttttcatttaaaatcatttagagtatcgaataagcattattagtttttaagcaattaaaaccggtagaaagggtttgaacacaaataaaaattttgcatttaggtcccttgccgccagggcggcaggtgattagatttgtaaattttcgaaaaaaaattatttttgtaaatattttaataaaaaaatgtataaataaaaaaaatcccaagttttatagcatctggcccatcaagctagcccgccgggaggctgatcgatccactcggcccagtaatggaagtatgaaacgccaacaaattgggtcggaacgggatccccgcttacgtagttacgggccgttattagttgggccggccgggaagggattacagcaacgaactttagcaaaagaaatgcgccttgagactaatacgcacgtaaaacggtacgataaattaactcaggaataatttagtattagttaaaaacttaaaagtgaattaatatagtttttaaagtaacttttgtatataatttttttttaaaaaatactccttttaacaatttgagttgagaaaatcaacaaaccaattcagcttgagtgtcttgattacttgtatcacttggcagtcttgggctgatgcttttttcggtggtccaattaacgattttatacgaattgattgtaccacagtatccccgacgtcaaatcaagaaaacactacacgaattcttgatttttgctccataaaacaatacagcatgtgtttcttaattatttatgtgctccaaatataataaaacctgtgattctctggagacgaatggccaatattataagcacaagtgcgaatcgtagtagcatgcaaattgaaaatcttccatgccggctgaggtaagctctgacgcatactttgcctataatttctttatatcaattattttttccgtgctgatagctctaagatgagtcaggacacgagtacaaagcagatggcagcggaatctcatctctcccatatccatcagtaataagctttgacctctgcgtgcttttttttgctcacgtagccgtgcagttacgccattttggaacaattgaatcgactatctaagtattttgctagtagaacttttgcagaaatttaaggagtatgtaaaattaaatgatataaattatgataagtcgaaaagaaaatagataaagaatatctgcattgtacgacggaggaagtaaataggagcccatgtacaattccaaagtactcactcgtacgatatcatttcctaaatttatcaattgtatctattattatcagtatgtggtgatcatgaatggtcggtaaaatataatcaagtatagctgtttgtcactgtcagtatgtcagtccctcaaacggttataggggtggctaggattgaaccaacataaattggcgcccatgcttttttagcgtatagaattttatcatccacaaacccgtcacaatccgtgaacgaacaaacttgaaaaatgaaatgctaaacatattcatcttcccttttccacacggaagaacagcagcacaataagtgaaacagtgatgcatcattgcatctgtgcatttaaagatatactcctgagtagactgaaaattctctcttcttgacgacagtaaaaacttttttagcttaacctccatgacaggttactgattaactaagcaagggtgtctcgtagtagtactgtactgtgtagcttaatatagcacgtcagcttctcagctctaacctctcaccattttcccaagagatatcgccatcacgatctcccgtaatcacttcttatataaaaagcaagcaagatgctacgagctaaacaatttctttagttagtcttcactaatcacgggcttaaacgcatcttgttacattctcatcggcaagcaaagagcaagagagaagagagaggagatggtggatgtgaagcacacggccggccacgccggcgcgaggagagtcaagctgttccgggtgccgcggcggccggccagggcggcggaggaggcgggggcgccgctggtaccggctggcgagaggaggaagaggaagatggcggtggcgaggctcggcggcggcgccggcgggcggaggcggctgttcggtgcgttccggcggctgcgggtgcggtggctggcggcgctgtaccgccgctcgctgcggcggctgcgcgcgtactacgccaaggcggtccaggacctcctcgagggcgcggcggccatgagcacgctgcgctcgcaggccgccgccgactgctcgttcggcactgcgttcgcgccggtggtcgccgtcggctactgatgagcgcgtgcatgtctgcagcaccgttctggcctgtgcatgaagaacatgaagccatggagcagtagcacccctgtgtatagacgtggttaactgtccatgatgaattccagtgctgatcttttttctctcttcattttatggatctcgagttctcgacaatgatcagtgttcatcctgttcgtaattagctagcatgtagtacaactttccggatctgaaaaaaataattatattatgttaaagaagagagaagatagtaagagaaaaaaatatattcgcttgattgcttcagatcagtctgttcgatgaagtaattagtactttatgtaggctggtcttccgaattttactccttgcacatgtcttacagtagagttcagatcaatctgggcatctgtcccaatttgtcatcgaataattagtctgtcgagattctgttccctcctcacgtctcaactctcaactgccgtctgctggaactaagataagcgctaatcgtagttggcttgcatatataataacgagtactccctccgtttcataatgtaagtcattatagcattttccatgtttatattgatattaataaatctagacatatatatctatatatattcattcgtatcaatatgaatatgaaaaatgctagaataagttacattgtaaaacggatgaagtaacagtctgtcacttcccttttcgtagccagcagtaatacgcaatagtaactcactgaagctattgcaaatagtaggcttaaggatggacacaaggacaaaatttcagtctaagatgattcccatcagagcagacatcctaccgtacgttcaggcgttaataaagtccaactgcgcctcaagatttgcatgtgttttgttgcttttgtttatgttctgatctggtatagtggtatactctctggactgatgctaagtaaaatcccgatcaaatcctactggagcctggaggacaacgaagcgagacagccctgagcccaatatatcacaatcaattcatggcgtgtttacggccccgtgaggccgtgactggctcagttacagaaaagggcctgggccgtcgttacaccgccagcccagccaacaattttcgagctgggcctccactgctgcgttccgttgttttggttggatcatccggccaaccagcgtcaacaccgggatcggccggccgcgtgtctgacggaaatggcaaattcaaagtttaagcagatttaaatcagtaattaggtagctggaaggagcatgaacgcacgattcatgcacagctgctcggtgcttcaactacacctgacctcacgagtcacacctgcacagtacgtgctacaccaactgctactagctgacgcgagttctatacttctatcagcatgacacatctcgacgatctcgtagaccaactcatacggagatcacgcttaaatactactcgtaagtcgtcgcagctgcaggtggacacgcggctaggcgaccaagcacaagcagcaaattaacaagcgtttcaacaagctggagatcacgagtccggagcagatggacggccacgtcgctgtggcgccgcggcgagacgctgcgttccgcgcgacgacgcggcggactctgacgattctgcacggaagctgcagggtgaggaggaggaagatggcggtggtgcggctcggcgacggcagcaggaggccgcggcggtttatgggggcgctccggaggctgcggctgcggtgggtggtggcggcgatgtacaggcgggcgctgcggcggctgcgcgcgtgctacgccaaggccatcagggacgtcctcgagggctccgcgctcgtcggcgccgcgcgcgcggacgccggggtttgagttttgcactttcacacatctcctttagggcttgtttggttgattgggaattaatccccaagggatcctaggattgagtgaatccctcccaattcccatctcactcaaaccctgtggggatgattccctttgcctctcctaatccctctcctaaaacctgtgttcggttttggctgggaattaacccatggagaagtccaatcaagcaagaaactactgaagcggctgaatactccaataaatagcgcattaaatttgacttatgcaaaaatcatacacagaagttgttgatgtcatgaaaaatactgctaacactgaagataacagtgtatgcgtctatttcttcaagcaagaagcacatcacaaacatgtcttgtcagcagacaaatggtaataatactgttaagaaactttgggcttggcccatgaaggcctggcccaaatacacttattgggcctatcatcaaaccttccatatattggaatgcactatataaagagaggagggggctactcatttgtacagttgattggatgattgaatagtgaaagagagtctcacccctaaactttgtgtctccacttttatacgattatgggaccctcttagactacttcgtgtagtaggagggttgcgtaataaatacaattattttcactttccaaatatctcacatagcaaactcaaaacaggctgcactagctaagtctaaatacacaacaaaacccaaacttctcccaggatctcccaaaatgagagtttaagtacttcatgaagctgctaccatcacattttaattacataaaatccaacatcagtgattgctccaaatgacgaactatagccttctgtgactgaaaaggataaccaatagttaataagatggcactactagctccatagtaaacaagtattcacagtaaacaagtatgcaaaagcgcagtggataacaaccaaattttcccttctgtacaacatctatgaaagcattgtagcaaaaactagacaggaaagttgtaggtacagattcaacaagcaagtccaagaagagatgcttatatactaatatcaagcagttgtccttatatcaattataaaaacttcaaaaggaacagacacctcaattgccaattgatcatcagaatttaacagtaacaaaaaagagagggcatggaaccagggagatgataagcaatggtgattgcagtgaatgctgtaaattcattgcagtacacaagaagccctaagctccatctctacttctcatcatacacagatgcatatgtctctgcaacaagtctgtcacttcatgttatgcttttcaacaagacagttattttaaattggacaaggatcaccagttggtactttatatgtaccagtgcattacatctagtgagaggaatattatgcttggaacaacaataaagaaattagtgcagtacaacccaacctgtcttcacactctaagaattggcaaattagtccaaattaaccaattttcggatcaaggtaaagcaataagatgttataggcatcacattttaattactgaagcggttctattatgccaaatgtcaagtttagtagtgaagcttggtgtgaaaaattctataggctcagtaattttaaatgaaaatagatattgaaatgaaagtgactctgcttgtaagatgacaaaaactgctcaaatagaagcatcacatgatgtccttcagcatcaactgctgcatatcaggagatccactagattttcacttcagctagctgtaactgcctagctcccgctttgcagcctcaattacaagcatattatatggtattgaatcttttttcacctatcctaaagccaaattgtgaacttgcaatggcagtaccatatgcagtactacttaaaatgcttgcacccaaataatcaaaattttggaatcctaaactaggataaatagatcatcatgcttaacagagaaaagatgcacaaatggatggacggtttccaggagaagcttaacagcggggcaaatttcctggaggagatgaacagcgtagtgagtttagtgaagaagcagcggatcaacgaccccagcatgatgaactggtcgctgcagctcaaggacgctatcgacgaggtggagtttacaagaacagcaagaacaacaagaatagtcaaagaatcgccttgtgctctcctccgcctcttcttctccgagggcgccacggcggtggcgcagtgggcgagggcgatgggcggcggcggcggcagagtggatgcgccgacgctatgctgcgaccgggagcggtgttcgacgggatggcggcgacgacaggaaagggagaagagaaggaaaccctaaccctagatttggaagaggaggggagaggaggaaaggcagcgtgctcaccggaaagaaggtggcggccggatgagagagccgtgctgtcgccgtcgccgtcgccttcgggtcgcgccgcccgccgcgcgccgcgtcttcgttgcgccgccgcctcctctcgaggtttttttccacgcctcgggagtagatgatttattcccgggccggggcgcagggaaaacaccgggatgggccgggttaaaatccagactgggcttaaccgaaaacatatttttctgtgggccggtatcctttccatgccgggattatccgtggggaataagttcatctgagggcgcacaacgggtttccgtcacacaacgggtcactcaactatcaaaaccggtgtagaataggtccctcgacgattttgagggcggttttggctgacgtggcgcctacgtggctaatttgactcagtattcatctgacgtggcgcttacgtagcaattcgatccgaaaaaataataagacccgtgggacccacatgtcagtctcacacagaaaataataaaaaatggtgggacccacatgggccccacatgtcagtccaactcacccctcttcttcatcctctctcccccatctcccctctcttcatctctctctcctctcctctcctctgtcatcaggcgacggagaggcagcagcgatgcgcccggacaacggtgcctatgcggaggagctcgcctgagcgacgccggcgccgatgcggcggggcgcggctgagtggaggctcggcgcgagcgtggccgtgcggtggtgccggccccggtgagggcacagcgcgggtcgcgccctcgggggtgcggccgggcagcggtgccgatgcggaggagctcgaccgagcgacgacagcgccgatgcggtggggcgcggttggaaagaacaacacggaatcaatcgacaccaaatttttatcgtatttcttttacgctgtttttccttctcttcgttttgctcctcccgatctattgcaggcagctgtcatcgtcatcgtcgtccctccggccggctggtggtgacgctgcgtcggagcagctgctggctgctgctgcgtgtgcatctccgcagcagcgttgccgcatgagttagacgcagcagcaggtgaatttttgtgttgctttcctgggataaattttggtggcaacattttcttcttctttcctcggttctcttcttcttcctatggcgccggtcgccgtggagtggcgctcgcggctgctcgggcggcgcggctcctccggccatgcgccccaccgcatcggcgccgccgtcgctcggccgagctcctccacatcggcaccgttgcccttccgcaccattgaggccgcgacccgcgctgtgcccgcgccggggccggcgccgccgcacggccacgctcgcaccaagccgccgctcagccgcgccccgctgcaccggcgccgccgtcgctcgtcggagctcctccgcataggcaccactgtccgaccgcaccgccaccgtgtgccgctgcctctccgtcgcctgaggagaggagaggagaggagatgggaggtggggagtgaggaggaagaagaggaggggtgagttggactgacatgtggggcccactattttttttattattttctgtgtgagactgatatgtgggtcccacgggttttattattttttgggatcgaattgccacgtaagcaccacgtcagtgccacgtcggatgaagaccgagtcaattagccacgtaggcgtcacgtcagccaaaaccgccctcaaaaccgccgagggacccgttgtgtctggttttctggatgagggacggaaatcggattcgttgacaagttaagggacctcatatgaacttattcctatctgtggggattgggccccgatcccggccgttcccggcccaaccgaacaagcacttaatttgcatcaaaaccctcctgcaatccttgcatgcattctgcgtgtcgaaagaatgattctgtgcatggcaaacgtgaacaaattaagcaaacaaatttgacagcaatttcgcttcagagttcagatgctttatttatgagataatctattctaaatcattaagtttgttcgagtacaacgatttgacattgacattgtctctttctataatatatcggtgactttatcaattgttttataatacgctattgggttaggcattcttttcaaaaatacccaaaatatccttatgaacatactaggttaacaattgatttatctcccaaaatatccttatgtggcctccttacgcaacatggaaatttgtacaggagtttcaagttttttacatttctttttttaaaaaatttataacttatcttttatatggtatataaaagtatttattattattattttttaatataaatcatctttcacatactaaattagatatttttatgctatcactcttgtataagcaaattttctctcgtatgccacgaaaaaatattttttttttaaaaaaataaatataccaaaaaaattaaaatttgtatacaaactttcatgttgtataaggaggccacatacaaaaatcatattttttttgaagcttctaataagataaatcaattgtttattttgtatgtctctaaggatatttttgaaaataaggtccagccctggcatatcgtagaacaattgttaaagtcgccggtatattatagaaaaagacaatgtcaatagcaaatcgttgaactcgaacaaattcagtggtatagaatagattatacagcaactacgcttgtgctatatcaggaggaaacatacgtctcgggttccccccgagtgcacccatactgccatccaatagttcggtttacaacagacaagtatacaacgtacgaaccatctgaaaagagggaggtcttctctatttgtggagaacggaaaacatgggattagggtctgaaaatttctgggagctggtttggatatttgttggatccatttttcgcttgagaaaccccaaaatttgaaattggaaatagtataggggaactctgggtgatgcttaggcttggtccttttttaaaccattccgagacatactagaacgtgggaaggtttaggattgcaagatcaaaccttttatatataggggtttggccggtttaattggaaaaaaaaacaaccaacaacataacatccaattaaccattgaatcgtttgttcagttttacatctattttccctcagcttttaccctagttcatccattatcgtcagtattacgatgtaagccgtccatcttcatcgcgagagttttgaatcttcttatagatttatcgcaaaaatcttccgttcatcttataagatggttggtcacttgtctaatccagcccgctagtcggctttgatttggaaattcattctgattgggagcttttcaagatcaatgtggataccgcaatgttttaggtgaatcacgtggtgatgaaaaaaaaacgtgaatgcgttgtattttgttcagacgacgcatgtagcacgccaattcattgccagtggacggcgacggctactcgacatcaatttccatcatggagactaatcaagcaggtgaccgagaatcactaacaagaagcttagaagttgccattgtaattatggatacggtcataagcatccatataaatagatgataccccgcactttgctacgggatatatgttagatattgatgaaatgatttagattaaaatattatgaaaataattttagaatgatgatttagcatatgtatgtttagttatatgtatgtttagttttagaatgaaacaaattatatgtataattactacttgcatgcttacatgttgagctttacatatttagtgtgcattagctctatagtgaagggatatgcagggatcatccattaatcctctgttttctttgttttattctgcttaattatcatataattccagcctttgttggattttttttaaaaaaaacccttgcgtagtgtttaattgcacggacctaatagttgggagttgggaacaaccgagtcaaaagaacaaaaacaaggaagccatagtttggcttattttaagcataagcgaaactgcatatttaaaaaaaataataatttatgaataaaacttttatatacgtgttcttagcgatctaaaagcaaaagctaaaaaaataaattttgataaaaaaacttcaaaattaattttaaatttaaggttgaaaatttaaattttaactgataagtataagcataagcgaaaaagataagtccgcaaaactataacactgccgattgatcggaatatcttcttaaaattgttgcatggcacgcgaacatgttaagcgacaaataaatttcagaacaattcgaccgcttcaaatctatctatctatctatctatctatctatctatctatctatctatctatctatctatctatctattatatactaaaagtccattaaacttcctacaaacgctctcaagccaccacgtgtcacttctacaatcgctcctagaccgccatgtggcaatatataatctcaccgttgattttcacttaaatcggtggacccgataatttagaccattagattagattagttgtattgacaccctaataaatcagaaaaaatccttaaaaactaaactcccatcgcccaacccttctggctggccccacacgtgcctaagtacgtagcaggtacgtttgcctccatgtgcacaatccaattcctcccccccaatctctatttttttttctaaatccacatcataatttctattctattttttctattattattattattattattattattattattattattattattattattattattatataaaagtctattaaacttcctacaaacactctcatgccgtcacgtggtgctctaaaaacactctcaagctgccacatagcactctaataaaataggtaaaatcttagaaattctgaaaaaaacccctcaaccctcgattttcatttaagttggtagagtattagtttacaccgttagaatagatccattataaatagtaatatatccctcctaacttaccatgtaatacttactaaaaaatattggcggaaataagccaagaaggcatacgtgcgtacgagttaaccactataaacgataaaagaagaaatgatatacagaataaaagaaaaaaaacatactgcatatatacgtactacgtactactggaaaaaaaacattgctttttaaactggattttcacttcctaaaaacattgctttttatataaactggattttcacttcctctgtattttttatgacggcgttaaatatttagttaaactaccgaaagaaaacaatgatttaaattagattttctattatacttcctttggattttttttaattttagtgaaggtggtagtataagaaaaatatattacttcataaaacatgcacacccaaaaatagatctagaatataatataaaatatcaaataaacgtatcatttcacactacaattgttgagtatagatagattctatttgcatcaatgggcctacatttatagttaaagatgaaataatgagtaattaaaatattactcaggacatttgtcataaacacatataaaaaatgtattgtttaaaaatatatcacatttttctcgcaaaataaagtcaggattttagccgttaatgacccaatctacgctttgatttgtacatattttttaagtgtacaagtaataaatgtaaggttgacttctaaagtacttattagattggctctccctcatttatcttgagtatgttctccgaaccattaaagtgttggtgttttacaaatactttctatacatacatacatacacacacacaaacacacacacatatatatatatatatagagaagttaatgttcatatctaaacatttaaaaaatattcatactcattcaaattgggtatatactcaatttaaatcttggagcccatactccatgtagcaccagttaatttacctatatatgtatatatatgtatgtatgtatgtatgtatgtatatatgtatgtatgttatatgtatgtgtgtgtgtgtgtatatatatatatatgtatatatatatatgtatatatatgtatatgtatgtatatatatgtatgtatatgtatgtatatgtatgtatgtatatgtatgtatatatatgtatgtatatgtatatatatatgtatatatatatatatgtatatatatatatatgtatatatatatatatatgtatatatatatatatatatatatatacatatatgtgtgtgtgcgtgtgtgtatatatgtacctatacagggatgcgctaaaccgcgcctgggtgtgcaataactaaactactcccctcacagcaccccatccccccaccccccacccccaccccccaaccaggagggctctcccaccctctcccgcacctttttctctccttcaccatttttgtctttcagtaaataaattactcgcacttaatatcttcttattagtaaatgaattactaactcatatattgatcttcatattatcatcccgcaccttttggcctgtccattccaactgcaacccacatatttctcttgcacacgtagtaaataaattactctctgttaatatctttttattagtaaataaattactcggaatccaattcattacttctttctgtaaatggattactctcgagttgttttcagccgttctcaattggttccttctctcagtaaatgaattactgtcgggttgttctcattcattctcttagtaaataaattactattacaccaatctcaacataacatattgatattgccaaaaaaatctcttagaaaccaagttactattacaccgatgattctcaatgtctcttagtaactaaattactattacatgcacgaatccaacaaacaagacggcgctagtgccacatatcgatgttgagccgacaaagcactatagatccttaggtctcccatcgacagatatccatcacccacgaacatctagagaggcatcccacagccacctggatatagacaaaaacgattacatcatctaagagaagtctttaatttacactcataaatgactctaaatgaaatatgattcgccgaagaagaaataaaatgcttcataaaaaattgagctaccagtttaggttccttcatgcctacttttagccaacagatcattttttattcagactagcatggaggtcacattatgttttcttaacggtagttcctgggcttgcctagtcccgatctgtaatcgatgacattgtgcaaaaaacaaaattaagaatgcagttggctgaaaaatgtagaataggtaattgggatgcttcaggctaaaatatccagatatctctgattaataacatacaagttaaaagctacacaaaacctgccatcttttcagatgaaaaacgatttcaagaataaaaatggaccgaatgttcttaatgaaaagaataatcataaattcagaatgatctagcattcactacaaattgatctacaatggatcgatggaacatgcatgtatgttatacagcgcatcaacgaacacaagcaatcaccacatatctggagcccgcaaataagctgcaattaactgatcaaacatggcagctatgcttcctcaaagaaaaacaagtagctattgcctatagagattgattgagtagatagaacatggagagaaaataaaacaaattaagcatcctgactttcattggaacacatacgaattgaacatccatccatccatcgatcctgaccgccatccccatgcctgctttgcgtggccagggtctccagcgcctgctgccgaccggcacgagtgcagactgcagaatgtgaaggaatcagaatacaggagcaaattagcagaactgcagcagcaaatcggtaaaacaacaaagatgcaaagtaaaaagttcaaaattgcatggactcagctgcttaccctcattatcatcgtgcatcacagatcatgacgccaccgctgtgggagggaggcagcgatgggaggcctgatccgtgccagatccttcgagggaggaatcagggtgtggtcaacgcagccggaagctcctccccgcatcccgccgtcaaccgccccctcctcctcaagagatcctgtcgatgtcgacgccgattcatgggcggggtggggaagggagcaccagatcgagcgaggacctcaactcacctgtcgatgtcgacgccgattcatgggcggggtggggaagggagcacctcacctctccatggctcggcgcaaaggacgtcggcgacccgcgaccatcgccgcctccgaccgatttcacccgtcgttaaccgatttcgcccatcgtccgccgcccgtcgctggaggacacttccaccgcccacgctttcgtccatgagctttgtccacgctaccacgcaggatcatgcgtggaagatagtcgtgcgcagcaggaccagctgcatgcacacgctaggagctggatggttttgttcaaattactgtgtttcagatagggttaatgattctggactgatattcttgatagtgttttgggtatatacgtacctagtatatgtgcgtttaaataggtatatagacaattagaaatgatacttacccaaaatacgagttttaattcaataaaaaaatagttttactgggtatatacctagtatgtgtaaataggtatattccgaattataattgtggtacatcacacgtacccaatatacatgtttaaatactcctaagtatataatgtgttctaaggtatacataccacctagtatgcgtgtttaaataggtatacagccaatatataagaaattatgtttacccaaaacatgtgttttagtgggtatattcacctaaaatatactacctccatttttgtttatatgacgctggctagttaaagtttaaactaaacagcgtcatataaaaaaaaccggagggagtacctagtatgcctgtttgcgtaggtatataccgaatagaatctacccaatatgtgtgtttaaatactcataagaaattaatatgcgtgttctaaatgggtatatgcccaattaaatggtacaactggaatgcatgcatgtacaaacctagctcatgagtggtacatttgtgtaagcaggttattttctaaatattttcgagtgtattttctaattattttctagagtgtactttctataataatttttagagtgtctttttcaccggatatgtgttttttcttcttgccaagaaacggatttggcttttgtctttatcaaatgccatgcacattctcgaacgatgattatgaaggttaacttgtcattcttgcatgtaatcgattgagtgcgatgacaagttaatatatatacttagattccaaattttcatgtacttaattatattccgaaatttcgatgtatattactcgtataacccaatcgtatcattatataccttattaatgtgtaccaatcacattccatgcatagctaaacaccagtgcaaaatgctaaaatgtattggtcaaattttttaaatatataaattctgtaatttgaaagtgcaacgcgctaatttagatacgtgtacataagcctaccgtactactacacattactcctacttggtactgaaaatttcaaataatcggtttccacgtaatatactttgcatgtgtgtatccacgtaaaactacaattttcacaacccgaactgattatatacctactttacacataacccagcggatttgctataattatgtcgatagatttttttcgttgattacagttgattctctggccgttggatctgtgtttaagatccgtgcttccatattgactttttcctcgcaaagagacctgaaagcatatgctattgctagctaatctctaaagtcatgcaaatccaagtgaaacgtcacctaatttcgttctatatgtatgcatccttttctttaacacaaatttacaccccgcttacatcctacttacacatgtaattactatgtaattttgagacttacatctgtaattttaaaacttacattataaatacactaaatttacatatgtaatttagagacttacaatgtaaatacaagctgaccatttttgggtgaaaaatatggcgccataaatctagctacaccctaacccagaattgattatttatacctagaaaacattaataaatactcaccttttttttgcatcttggccggatgtgaaaattgacatacccgaaacccaaaattaatgaccttaaatttgctatttacctttgtcaaaaataatataaaatatcccactttccaattatacggaattgattttccataaattatggatgtaaacaaggacattaattacagcttaattacggtatagttgatacaggatcatgcatgcggcaattttttgaccagccgttgcactttctaaatcaggaatttaatacgggcagacccgttaatcttcagtccgcatcaatctcttgatcaagttctcatccaacggtttatacccatggagcccatacaccatggtgccccaaatggccatcctatatgtatatgtatatgtatatgtgtatatgtatgtgtatatatatatatatatgtgtgtgtgtgtatgtatgtatatgtatgtatatgtgtatatatatgtatatatatatatatatgtatatgtatatatgtatatatatatatatatgtatatgtatatgtatatatatatatatgtatatgtatatgtatatatatatatatatatattcatgtttgtaatatttaatacttaattagtcctgcgttgataacctacgtcgtctttcatgccctgcctaaattcaaccaattagattgaatgtagcctaagtaggagatagattagattatttactataaaatttaaaattaaagaatcaagttaactacattattaaaagattctgcttaagctcaaccaattagatcaaatttagcctaagtaggagataaattagattatttactataaaatttaaaattaaagaatcaagttaacttcattattaaaagattcattactttggatcatatatattctatggactagcttttgttaactaattcatacatttttaagaaaaaagcaaataagttttgttgtctttctcgctatttcttagctattaaactaaagtagaaacaatcaataatattggatttttttagaaacacgacacacgaacaccctactcctttgagtacctctaaaagactgatccaacacgttttgagattgaggatgtcaccacgggcgtctcgctgtcgacgggtatgccacctaccactgaaagaatatttagccgtaaatgcgagcacccgtatcaagtctaggacttgaaccaggtagacaagttacaccacaggaaacctaaccaattgaattgtgctcacttcgcaataacattggataataaaacaaccataatttttaagctacataactggaatacttttatgccttttaaaccggtgaacaatttgttataactgttagatctatcttatataaaagttaagcatgtatttatggtacatgacatttccaaaatattactacgcaattatatttcgtcattatcgtattcatattaggttgcatggagcctttcacccaccctacatgaaatgttcatagatggatcacctctcaaactatatcaatcatattagcttatataaacccatacatttagtggagcttcatgtcccacccaattcatctctaattgaactattataatagatatgtaattaaaaaacaccttactttactttcgttgacatgttttccaaaaaatatatgtttaccttattttcaaatgataaagaagattataaataattgcttatagatattccttaaatatgatataatataaaactaataggttactaacttagcaattagtgctgatgaaaataatttatgtacaaatcgtggcagatgttctccgtttaatatttcgctcttatacttatctcaaacttagaatagaacgcatgcccgcgcgaatgcgcgggctaccttcctagtttatttaatagtgatacatgcgtgctcatacttatacacagcagcagacagcagacatccgcaattccgcatggatgcacccatatacagtagtactaggttacgtttacaatataaaaccatatatatgtgagacgatggccttagattatatatattaacatacgagacaatgtcgcatgtgaatttattgccaggtggccacgacggggctcctcaccgtatgttggccatcgctccagacgatcgatccccactggtgctcggacgagctggtcgcccctgccgacacggtgatggagtaatccagcgttctgcgctgcgcgtcgaacgcgagcctcgttggcgtcaccgtgagagtggtgccgggcggtgcggtgatggtaacgttgtacatgacattggtgttcgccccgacgttggtcacggcgcggcgctgcgtgacctgctctccggacctcacgaacaccaccgagaacgccgggtagttgaggtcgcccacggacctccgtggcctggtcgagcagtctgtcgtcgaaccgtcatttgtgaagagcgcgatctgactactgttgtagccgaggctgcagaggaatgttatgtaatcgtcggcggtggtgttgttcaccaatccagggtcgagggcacggttggggtcgacgtggccagacccaagctcgaacggcctggctgcctggcccgtggccatgtccttgatggcattgccatcattgtccacattgtaggccgtcgtcatcatggccgacttgattgccgctgggctccaactcggttgtgccaccttaagcatagcggcgatgccgctcatgtgcaggcacgccatggacgtgccggagatgatgttgaactcgacgcgcctattgtcgatgacattggccatggtaggcgacatttctccggtccatgcagcgaggatgtcgacaccgggggcaatcatgtcgggcttgaggatctctggagcaaagcggttcggtccacgacttgagaaggctgcgacccttggagcagacggtgattggttgatcacagtgcctaagaagtcgattcttgcaaccgggtcggccaccgactgtgtgtacgaatggatcgtttcggtgtccttgaaggtaatcgtcgacgttggcaagatatcagcgaagctctgtaagaaatcaccatattctggagcaattgaaatgatggcaccaacaccaccggcttgttggacagcagcttcttgcactatggggttggtagtattttttgtgccatagcagaggacaatctttccggtgaccatgttgctggaaagcatcccgtattcacacagagcagaaccagcatcaccaccgtacactagaggtagaaatgaaccggctgtgttttggccgaaatacagcgaggtgccgatgtaggttccgcgattatgtccaaggacaacgtgagctgggaaccgacggtcaatgcttgatgcgccaaccgttatcacccatggtgcgaggttattagcagtatacgtgccagggccatcatttccagcggaggtggacacgactatgcctctacggatggcattgaatgcgccaagggaggtgggttcgttgtagagttgtggctttagaccacccaaggaaagggatatgacatctactccatctgcaattgcctcattcattccggcgagaatgtcagaggtagcgcacgatgcatttccatcatctctccagcatactttgtaggatgcaatgtgtgcacgtatagccatgccttgggcggtgccattggcatagccaacaaagttagcgccagggaccgctgaaccagcggcggtagatgcagtgtgcgtgccgtggccttcggtgtcgagaggtgacttggactcttgtgtctcattgatcaggtgacccatcttggcctcgtgccctttatagaaaaactttgcgccgacgagcttgttgttgcagtaggcggtggcattaaacgagcgagtggagacacaatgaccacggaaggtgcgaggtggtggaggaaacgacgagtcagcggtgaaggatttgcggcccttgggataaatgccagtgtccaagatcgcgatcaccgcgcccgtgccgccgccgtttgatgcctgtacgaggccaacggacggtgagagacggaggaaggagggagactgagtggtgtgcagttggagatgctcgtcggggtagatggcgaggacaccagggtggtccgcgatgtgcgcggcctggtgcttcgtcatgcatgccgcgaagcccgtggcggcatgggagtaggcatagacgagcctaggtgctgacctgtcacgcccagaagtttccccctttttccttgctttaaatatttgttaaataaatcgtccgaagaaattatcttaattaacctagagctaattccataattaataaatgcaattaataatcggaaatagcgtggtggaatttttcttgagttccccatgctccaatgcattaacaagatttttagtggaattttcagagccttggaaataattttaaccaattaaaaatcaccaaagtgcaatatttaatcccaggaaaatccttctcctctttttcttttcttttccttcctttttctctagatgggccgtcggcccatctctctcatcgcgctcggcacccctttcctgggccggcccgctcctcctttcccctccccgaagtcctccctccctccctttctctttcgggcgccgacaggtggggcccacctgtcggtcgtcccctacctccggtcgttggagccggagctccacccgcccgcgccgccgccttctccactccacgtcgcgcctccactccgcgcccgcacctcgcgcccacgtcgccgccctctcccccgcatctcccgcgcgcgcgcgcccgcaagtggtgggggatttgaaatcccccaacaccctctctctctcctccacctctccacgtcaccggccaaataggggccatccccggccgtttccgcccctccctcgcccataaaaaccctcactcgagctctctctctcatttcccccattcaccgtcctctcccacgccctctaccgccgtcgcgccgcgctcgccgagctccgccgccaccgcccatctccggccgcgtgccgtcgccactagggccgccgccgtgccaagccgccgccgccgctagctccgccgccgtgtgggccatctcggccaccgcctcgcgtcgccggaaccccaccggaaccccatctccctcgcgagccggtgagctatccattcccctccgtctccggccagccactttggtcgtcgcggttgccttcttcatccctaactcctctcctcccctcctctaggtgtcgccgccgctcgtccgcccctcctctcgtcgggtcgtcgtcgccgccttcgttttccgctccggccgccgtgtcgccggtgagtcctccctccccctcctttcctcaccttcccgcgagcgccggccacgccgctgctccggccatgcgccgcctcctttcggccgtcgccgccgcttcccgcaccgccggtcaccgccgtcggtggtcgtgcctcgccgccgcctcgccttggtcggccggtcggccttgaggccgagccgagcccggccagcgcctccctcgcctcccctttgagccaccgcctggtggggcccacctgccaggcgccacctccctccctttggagccgctgacccgtggggcccacgtgccggcgccccccccttcgctgacgtcagccctgggtattattgcgcaataattaattaaggactttttctttattagtaaaaacacagtttatcttctaaaatttataagtaattcatccgagctccgtttaagtccattcaagtctcagtaaatcaagaaaaatgcaaaaaatccattaaaaatagttttgtttcctgtttcagcagtcttatagcatgttttgcttgtgtgctttgtttgtcgcgtaggtttcggccgtttcgtcgatccgcagttcctcgaagacgttgccgaggtctcatcagttcgagagcaaggcaagtcatgcaatacgtttgatcatactgtacccaatttacaaatatcccgcatttctattaaatgttgcattcttttacaatgtaatgtgggatgggtcctattcctcagccacatattggttaccttatgccattgataacttgggtatcaaaatgactagatgttggcttaggaaatgcttagccatgcttagttcaactaggacacaaatggggatcacattattacatagactctgactattggcatagctttagattggtgccaccgcaagggtgtcagttaattaaaatattctgaatggcgggctgtgggtgcatggttttgctggtcgcacccatggcagttaaggaccggttcacgggaaaccctgggagacttatcgtgcttaccacaagcgggagtgggtaactgcttgatctgaagcatagctcgaccctttcctaggcaccggtggcgagggtgggcgtgatggagttgggtcggccgaggtgttcggttgtccagctgccggattcaccgcggcgcaagaggggaccgcccactgccttttgaggggtggggggtgaaaccttagcgtggtgtggatggttaggggagggttatgtggagggtcttgtcacgatttccccctttgcagtatcatggtgatacttcggggcatggcgacatgtgtggaatcgtgtcttgtgggtacagttgtacacctctggccagagtaaaactattcgaatagccgtgcccgcggttatgggcgatcaaccagattcaccgtgattagtctcacccctagtttagcttaatgaactggtgtagtttaggtggttggttgggcctattgcaacgtggtgtagcgttggacagtgattggttaatattgattaattactacagctgttttactgctttcaactactgctttgaaatgcctgctttatgcaaaagaacccctagcttcctttggttatatcctgcatcatacctcctcttccggtatgacttgctgagtacagtgggtagtactcagtcttgctctcttttcccccacaccagagttgaagttcttctccgttggagccgtctcagagaggttggtttcgttgctgccgtcaaggtttgcctgtggagtggagtcgcccgctgctgaagtcaagcttcccggtttagctcgctttaatctttcccgctgcatttgtaatcttttatatttttctaagacgtgggtctgtatgtcaacaattgtcgtttgtgtaccctggctggtcctggacagggatttaatgcacattcagcttagaaattctggtttgagaatttctaggtgtgacatgacccgctatgcatgtgggaaggaagaatcctttgaaggaaggacgtatagtgggcatgagcaaggtgtgccgtgtttgctgcatgggcgtgcacgacgtgcacgatgtaggtggatacttcgtctgattgctccgcgcctacggatgtcgccaccaatgcggcatttagcaagcttaacacaatcaggaagtttttgcccatggtgacaaatgagatggacggattgattgaatagatgcgtgctgtgaatggatggagcgtatatcgaagacatgaagggccggggtatatatacaatgaaaatattcctactctggtcacataatgaccttgaaaagtaaatttcatgcatgcttaggatgcacttgcatcttctcttctctctgtgtagtttgttcttcctaattgaggaagcgagaaaatttcaaactttgcgcgtgcaccctcctccgttcaaagatatggttgcagcattgcctggattactgccacactactagtctactacagccagcttccacaaggtgccaagtcacatttttgagccccactctggtcctccactggaaaataatatgaaccattgatctcatttcatcgatgggttaagatctatttatattaccaccctacttagtgatagtagaaatgtggagatgtattattgtaaaaaaaagtgttgaggggtataatcgtcttagcagtgacttaaatattttttttctttttctttttgctttttcgatgaaatatgagcgatgtcagtggattgaatgatcacagattgataaaaaaaccgtaaataacaaagttacccctaatcattgtattagtaaattactaatttacccttaattctacttagtagtttataatattgcaagtagagagcttccgagcattgctcttcttcctaattagctgcgtgcttccgataagagccattatttgtttttaaatttcacataagatgcataaccctacacatgtacacacatatataccaacaaatatatcttctaacacacgttcaaagatatagtgatcaatgataatcctgatctcactaaaccattttatagcgcacagagtaacatattgtctcacaatattgtactccaactttcatcgtttaaaatttattataaaatatagcaacttgtccacttatttcctcacattaacaattccaagcatttctcattgatttccccatctactttcttattgtaacaaccccaatagtattttagttttttaattgatctacctacttcgtggatcagcgtggaagaaattttctactagtatattattttaggagggagggaatagaaagtttcttgtataatggaagtcaccaatattaagcgaaccggcgttgacgaaatcccattattgacactgattaagtgtcgtgtcatggaattaacagtcgcattgacgaagtccctaatctagaatcagaagctaattccggcccccggttctcatgtattagctattcgctgataaaaagtttatcgcgcgctatgaattttgaatattcctcgatcaactgattattctcatgtttgaatgagtgatttctagagccaagaatagtacgattccgtgtgtaatcggaaaaaaaagaaagaggaaattatatttgagctatcgtttattgctaacactggtggagaaactctttgtagtcccggtttgtaaccccctttagtcccggtttccaaaccgggagtatcaatccgggactaaagatcgctatctttagtcccgggtgaaataaccgggagtaaagatcgatctttagtcccggttggtgttaccaaccgggactaaagatagagctgacctttttttttttttgcatgcccctgttgctgcatggtttatatatatatatatatatatatatatatatatatatatatatatataaaccatgcatatatatgtttcaatacatatatatgcatacatatatatatgtatttatacatatatatgttatgcaaatgcatatgtatatagatatatatatgaacaaaatatatttacattatagaaaatgtgtacacatgcatatagaaacatatgtagtcatgtattaattacaatccattatatgtcctagctagctacggtttcgacgtagtagtactcgctgctagctcagaagctaaggaccggtgaattgtgtttccgtcgtagtagaattcacccttgggatcaaggatttcttcgttgatgaatcccatgagttgttcttgaaccgccgcgataaattccttgtgtgtggtcaggttatccctcatgcgaataaactatatgaatgtatgaaattgattagtaattaaacaagaaatcgctacgtaatgaaattttgaatttatttgtacgtacatcgagctctcttgtggtgatgatttggtctgcaaggcagtggcaatactcgcacacgtaatagccgcacaagttagttccctgcttttgctttgcgcactacaaataaatgacaaacaacgagagatctaattaatatacacttatatgtatttgaatcggagaaatataaatgtagagcatgtgtactcacaggaaatttgaacttccgcctaagtctttctctccatttgccgcggaccaaatgacggaaccgataccaagccctacatggagtttaaagctatgatttgtagtagcaattaacataacaagattttcttaattaacaaaggaacttatgacggtacctgtctataagttcgaaaaccttgtcaaacgtagactcttttttatccattgagtcatatacgttgacggtgcaggcctccaggtcgatgagtaaaagcacccagtggaatctgcaatgtgcgtgggatgcattacatatgaaacacttagcaagttcgtacgggaatgaaatttggtatgtaggaagacagtaaaattaaactaactctgtgttgtatggcaacagtatgaacgtcttgtaatgctgcgccttcaggagatggacgagattgtcctctgtttcttgtggatattggtcgagcattgcgacgtttactttccgagggtcgatgaatccagtatcgaaaaccctccgccgtcgggccctttgaatctccattctacaacgataaaagggagtatattattttctatggtctacttatatacaaggacctaattaattaaaggagacgtatagtaagaaatctaactgaacgatatacttacaaaatccagcaactcataatagagacgtcgagggcgtccagctggtatagttcgtagattcccctgaaattgatccagagaatgtcatctccttgcaagaagtccgtgtccctgatcctcgctccgatcatctctctaccggtggcgctcatctccatgtacagctgatggaacttgtacatttgtgtgggtagggactgcagcagctcaggcttgacaagcggtttaccgagttcgtacatgtatttcacttccgccttttcgattggtgcgactcctagcaattgatccgtagttagaccggtgtcagtaataaattgttctatcgtcatttctttaccggtcaccaacggctcgatctcctggtttggttgctctccaagctgagggactggtttggactttccagaagatgctttcttcagcgttcgctcatagtccgatagcttgatggcattttctttgtttctttccatcatcgccttcccttgttcacctgtcttatatgcaacgaactcgtcccagtgatcccttagctttgggaatgtgtcgaagttcggtgtctgccccttcagtatatacttctggtacagatctcccttgaagctctgaaactgttctgccattttcttcagagtccaccttttcactttgtcctctgtacccgcaggaagggtgaatgtctcgagcattgtggtccacagcatctctttctccgaatctgggacaaagctctcatgatctccgcgtgcccttgttcttcgccagtacaccgtactgacaggcacgttatcccgcacaacccaaccgctgtgacgtacatagttcttggcggcttcggccggggcactaggacgtccatcttcttccacttccgttatgatgtgccgaccctcaagcttcttcgctgcacctcgttgcccgcgtgccctcttctgtccaacggagggttgactaccactagcctcctcctcctggttcccctccacatccctttccacgtgcccctgctggttcccctccgcatccctctccacgttcccttcctcgttcaagtactggtttggatcctcgttcccctcttcttcattccagtactggctgcttccctccgcgattgtatcgtacaatatctgttcctcatcgcggtcagccatctgtttgatacaagaaacatctgctaagtcacgagacatttatgttttaacaatctaagtcatgtatgctaagtgtaaatgtcgtacattagaaccctacacaaccttacgtgctaagtctaattacaaatcgtgatataagctaagtctaggtgacgtatattatacaaccctagctagtaaataattatatactaagtctaattacaaataaaataatcttatattaaaactcaaataatattacatgctaatactaaaatagtcatgtatatgctaagtgtttcgtgcgtatatgctaagtctaattaagactacaatagtcaattgctacttgtcgcaccaattccgtagtcaataattacataccaagtctaattacaaataaagtaatattatattaaaactcaaataatattacatgctaagactaaaatagtaatgtatgctaagtgtttcgtgcgtatatgctaagtctaattaagactacaatagtcaattcctaggagtcgcaccaattccgtagtcaataatgtcatactaagtctaatttgcaataaaataatcttatattaaaactcaaataatattagaacactacacaatcttatatgataagtctaattacaggtctaataatcttaattaattgcattacaaatataacaatcatttatattattacgtcacttgcctgctccaattccttctagggctagctcttccactcaggcttgacggacgactccgacaacacgtcttttctgcaagataaaaaaatgtattaggataaatgcgaagtaacatatatatatatatatatatatatatatatatatacatgtatatatatatatatattgcatttcacgttaacgttcgtcctcgttcgttcgctcgttcacgttccctagctcgttcacgttcgttcgatcgttctcgttctcgttcacgttgtcgcggcaacgtacgttgacgggttcgttctcgctctcgttcgttcgatcgttctcgttctcgttcgttaacggcggtgtggcggcatcggggcggcggttggcgcggcggcgtggcgacggcggcggcagcgtggcgttgtggggccgtggcggcggcggcgtggcgtggcggcggtggcgtggcgtggcgtggcggcggcggcgtggcgacggcggcggcggcgtggcgttggcatgcggcggcggcgttgcgcggcgtcgaaggcggtggcgtcgaaggcgacggcgtcgaaggcgacggagagagatcgagatcggagagatcgagatgcatgaagggagatgcggcggctctcaccccagagatgcggcggcagcggaggaggcggaggcggcggcgaggacgacgagctcgagacgacggcgagatacggcggcgtcggcgcggggatttgccctaggcagtggcggcggaggagagaggccgagagagatcgatcggccgaaaacttttaagtgttggtgaagaagacgagggcgcaccgggaatatatatacccctggatctttactcccggttgttctcaacaaccgggagtaaatatcttttcccgctatttcgaaattctttttaaacccggttagggttaagaaccgggactaaagattatagcactgcatatgattttcgcttacatatgtgtttataaaatagaagttaatgcattaacattatttaaagtacaaagattgatgacaattacttcgaaatattatttttgtctgtaataaattaagtggataaatcgtaataagcaaatatatgacttataattaataaaaattccaatatatatatatatatattcttagcatatatatgaatgatattattatattggtaaaaactctaattaagatattaatgtacatactgcatgatttaaaattaataaaaattgtaatcatcatatgtacttagcgtaggaattatattaaattaaatgctaaaaactctaattaacatatgtaaatgccacatgcatgatttaaaccttttaaaaattcgaatagtcatatataagtagcatatgaaagatagtaaattaaattgtgaaaaactctaatatatgaatgatagttttaaaaatatattaaatttaatacttttaaaaattctccagtcaattataattagcatatgaatgatagtaaattaaatgttaaaaactctaattaacatatgaaattgccacttgcgtgatttaaaacttttaaaaatcctctagtcaattataattagcatatgaatgctagtaaattaaatgttaaaaactctaattaacatacatatgaaattgccacttgtgtgatttaaaacttttaaaaattgtaagtatcacatataactaacatatacatgatttaaacttgttgaaacctctaataatcgtgcgtaattaacatatgccatacatcaattgatttatatggataatcaatacatccaaaatagtttacatcgtgtacacaataattacggcattacatcggcggtgacggttgaccgcacgtactttctcctcactattgttccctccttgtgatcgctgcgtgagtaaggggtgtcttcatttgataggaggatgctagggtcaatcgtcaccgtgaaagggggttgcccatccaactgatcgtaatcctcgtcagtcttgtcctcaactccgacgatttttcttttgcctgggagaaccacttgacgcttaggctcatcaggccctctgcccttctttcctttgctagacatgtccttcacgaaaaagacttgcgttacatcattggcaaggacaaaaggttcgtccgagtatccaaccttgttaaggtcaacagttgtcatcccactgtcatcaatcattacgcctccaccagtcaacctaacccattggcaccggaacagaggaaccttgagaggaccatagtcaagttcccatatgtcctcgatggcaccgtaatacgtggcagttgttccatcgtgtcccatggcatcgacacgaacagcgctgttttggttcgtgctcttcatgtcttgggctctcgtgtagaatgtgtacccattcatctcatatccctggaatgtcgcgatcgacccagacggtcccctcgccaggaaggcaagttgttggttgatcgactcgttacccatgagatgttgtcgtagccacgcggggaaagtatcaatgtgatgccgtgtaatccatgcatcggacttaccgatgttcctggcgcgaattagagccaagtgctcctcgatgtaaggagctaccaatgaagagtgttgcagaacagtgaaatgggctttacggaataaattgttgtctaccgtcattattgctttccttccgagagttccctttccccgtagtctcccttcatggcgtgattcaggtaccccgattgggcgaaggtcttcgataaattctacgcaaaattcgatgacctcctctgttccataacccttggcgatgcttgcctctggacgagcacggttacgaacatacttcttcagaacgcccatgtacctctcgaaaggaaacatgttgtgtaggtacataggcccgagaatacggatctctttcacaaggtgacaaagcagatgcgtcattatattgaaaaatgaaggtggaaatatcaactcaaaactgacgagacattgcaccacttcattctgaagggcttctaatctatccggatcgaagaccttctgcgaaattgcgttcatgaatgcacatagctttgttattgttgcccggacattgtctggaaggataccccttattacaactggtagcagttgtgtcatcaacacgtgacagtcatgagactttaggtttgtgaacttcttctccttcgtgcttattattcgcttgatattcgtggagtatccagacggtacctttatgctctccaagcattcaaacatactttccttctctgccttgctaagagtgtagctggctggactcaagtaatggcttcctttctcctttggttccgggtgaaggtcgccgcgttgttccatatgcttcagatcattacgtgcttccagtgtatctttcgactttccgtatacacctaggaagccaagaaggtttacgcaaaggttcttagtgaggtgcatcacgtcgattgcgtggcgtacgtccaagaattcccaatatggtaactcccaaaatatagagttctttttccacatcgccgcgtgaccatcttcgctctctatatgctggcttccaggcccctttccgaacactactttaagatctttaaccatagcaaacactgttttcccgctgcgatgtttaggcttcgtacggtggtcggccttatgttcgaagtgcttgcctttcttccgtaccgggtggtttgctgcaaggaatcgacgatgacccatgtatacaaccttcctacagtgcttaagatacgtactttctgtttcatccatacagtgagtgcaagccttgtaccccttgttggactgtccggataggttgctaagtgcaggccaatcgttgatggttacgaacagcagcgctcgtaggttaaactcctcctgtttgtcctcgtcccacacggggacaccttccttcttccacaactgtttaagatcttcgaccagtggtcttaggtacacgtcgatgtcgttaccaggttgcttggggccttgaataataatcggcatcattatgtacttcctcttcatgcatagccaggggggaggttgtagatacacatcgtaacgggccaagtgctatggccgctgctcatctctccaaaaggattcatgccatccgtactcaaaccaaaccgtatatttcgtgcgtcctttccaaattctttaaattttctgtcgatgtttcgccactgcgaaccatcagcggggtgtctcagcatcccgtcctgttgacgctcttcagcgtgccatcgcaacattctagcattccccttgttcctgaacaaacgccttagccgtggtattatagggaaataccacatcaccttagcaggaattctcttctttgttagctgcccgtcaacttctcctggatcgtcccgtctaatcttgtatcgtagtgctttgcaaacagggcatgcttctaggttctcatactcctcaccgcgatataggatacaatcgttcggacatgcgtgaatcttatgaacttccagtcctaacgggcagactatcttcttagcctcgcacgttgtctcgggcaatttgtttccccccggaagaatgttcttgacgagtttcaataaatcgccaaatgccttgtcactaaccccattttttgccttccattgcaacaactccagagtggtatccaactttttgtgcccctgctcgcaacctgggtacaacgaagttctgtggtcctccaacatcttgtccaatttatgggcctccttttcactttcgcagtcttccctggcgtcctgcaacatctgaccaagatcatccgcaacgtcgttaccatcagcagctatttcctcctcgcccgtttgatttccttcaaatccaacatactgagcaaagtccggaatattgtcgtctttcacttcatcttcttccatttcaacaccttgctctccgtgggatgtccaacaattatagcttggcatgaaccccgactcaaacaagtggaaatgaatagtcctggatgcagaatactccttctgattcttacacttattgcatggacaacaaataaaacccctttgcctgttagcttcggccactctcaaaaaatagtgcacgccgtcaataaactctttggaccgccggtcagcgtacatccattgccgatccatctacatgagtcaaaaaaaccgcacacaaataattattcttacaataatgacagtcatacaataattataagatatctttattcatacaaaaatcataaaatattacaccaaataattcttaaaaactatttgtaaagttttaaactaattttaatgtgttttacttcttttaatttttattttagtttgttttctattatttaatattaactttcactagagttttccttctcaactattttataaaaccttgtttagcaaatgaactaaatttctatatattctttcttccccacacacattttctctctcatcaacttacaactaaattttggagacaaaaaaagtgtgcaaaacataggtgcaaatgtagtatgacaaaaaaacattggaggatgaagttgcaaaccttttaggcacctccgatttgtatgtaatcaccaaaataaattcaatagaaattttggcatgacctcccctcttttttgaagaaattttgaagcttgctcgggcagctggaggaggaagaagacatatatataagggtgggactttagtcccggttggtagcaccaaccggggctaaagatcaccgggatcattagtcccggttggtaataccaaccgggactaaagttaagatctttagtctcggttagtagcaccaaccggggctaaagatcaccgggatctttagtcccggttggtaataccaaccgagactaaagttaagatctttagtcccggttggtgctaccaaccgggactaaagatcccggggggcctgacaggtcctgacagcattcgaaccgggactaaagatgatctttagtcccggttggtaacacaaaccgggactaaagatcaaatatgcccgttacccttttgaaccgggactaaagatcatctttagccccggtttttattgcatccgggactattgtggaaatcggccgaccgacgaaagatggtttctccaccagtgtaaagtttagttttagactatccttttacaactcttttcattttgaaaatgtgttgtagtttgaacatttctaactctcttatctatattaatatatgtctagcctcacctctgacaaaaaaaaatgtaatctaattagtacgtgtgcatgttttctttctaaggagggacccgttacgagccatccgatgttgtccgcatatatcagtggtggatgtatcggggccaggcgtgattccattcccaataattgagagtgtattctaatttcttaaggggaagtcccccgtatataatttttcccaattctatataaattgttgtgaaaaaattatgaaaaattcacaatattgaatattgtgatatttatctatccaccaaaaatcaagttcaaatctgacttacacatcaagaaaaaaaagataaattcagataacaatacgttactattcatatgctgaatttgtctttttttatatctcgacgtgtgagttgagtttgtatataagattttatgaagttgtataaatatgtttgatgagtgttgtcatttttccctagaatttttcataatagtttgaatggtttttaacttttaagcaatcgataggacatcccctcaaggatcaaaatagtttccccaatttttttttaacaatagctagctactgcttacgtataagcagcaggttgccaaatgcgtaggatcgatctactgtaatcttgtcgcaaatcatgtacagataatttagttagctaggtaacgtcgcctttaatcatcctccacacacacacacacacacacacacacacacacatatatatatatatatatatatatatatatatagtaaatttgtttggtgctccatggtgcccgggcaccattgttgaaattgagtatatacctaattcaaatgagtatgaaactttttcaattacttagatattaacattagctactttactaactagttcaaagcaagtttgaactgaatttgaactaaatagagttgatgagttagttagataaccttgccgttgattatcatcatgtgaaaatattctcgtataactaggaataatatagcccgcgaagattaggaggcactttgtctaagtagcatttaaatatttaattttagttgactattacttaaaatattatttaattatattttatgtatctaattgtgtaatactccctccgtttcacaatgtaagtcattctagcatttcccacattcatatcgatgttaataaatctagatagataaacataagtcattctaacatttctcatattcatattgatggtaatgaatctagatatatatatctatctagattcattaatatcaatatgaatatgggaaatgctatatatgtctagattcattaccatcaatataaatatgaatatgagaaatgttagaatgacttacattgtgaaacggaggaagtaggtgtgaaaatttataagggctgagcatataaatcatataatttgtataccttgcagtataggtttaatattacattctcggctttgaccagttaggaagtcataggagaggaaatgatacgggcagtgtctgtgcataaaatgttatgataaacggaaacggcgacagcctcatagccatggagtatgttctcatgttcagaattgcacagaccctgtgaaactgtggggtgggtggcttgtcgtggctgctggttggcgccatggtatggctaataggaacgcatgtgtggcttgagatctctgattgattaattatttttttggtgaaatatgtgtagtgcaaaacttctttttatatataccatatacaataaagattgaagttatcatttgttctataagaaattaagagcatctttttaaaagttctaaaaatattgttttaattttcataaattttgttgccgcaaaattttttatctttaattttaggttttcttatgaaataatatttaattatattttacatatctaacggtatattataatgggtgttaaattgttgttttgtggggaataatgtgtgaaattgaaggattaaatatcacctataatcacccaaaaaaaggaatatcatctatattctatatatagaggtcccgtatgttaaacattatagcattcaaacagggtaaacactgatctgattgctcatgttgtagatgctatatttgattgtttgtctttttttatgcatctgtattgttgaatataacttgtctttgtaagttcagcgaaacctacatctcctaatttggcactattcatttagggcccgtttgtttgggcatttggtagtaacaaattcgtcgtttaccattagctatttaacgtttctcaaactgctcaacggcatgttttttgacaaaacattttatatagaagtatatttcaaaataaataaacctatttttttaagtttatagtaattaatatacgattaattatgtgctaatgactcattccattttctgagccgccgatatctacaactgttttagttttgatgacaacatcgactacccgtccattaacaaattatttgcagtgcattcagtactgcaatagcatttgtagagctgagtaattcactgttatcagtgaatgcccttccctagcagggaacgcccacttcctcggttcctcccttcgcagggggctatatattctcccccgagcagccatgcagcagtcttaatgacagttacttcctccgttttataatataagttattctagcatttttcatattcatattgatgttaatgaatctagatagacatcaatataaatatgaaaaatgctagaatgaattacattgtgaaacagagagagtacctgattgtgatgttaggtaccaatatctgactgtgtggagtgctgaagatgtgccgatgaggtgccgacgccagaatcgctacgagaaacgtgtggtgtcgagcgtcgaggtgccactgagatatgccgaaatcgtctggtccggtgtcacgtaccgaggtgtatatatatatatatatacacgtaactaacttgacatgcatgcataaaagattatctgggaatcggaaccggtgttgaacttgggcattggctgcttacctacgggactgtaggggcggagaagaggtgtaataatctaacggttcagaatattgtacccatcaatttaagtaaaaattaatagatagatatcttgattttttttctcagaatttttaagatttcatctaatttattagagcgtcatgtggtagctcaagagtgttttatggaagtttaatgtacttttagtgtataactaggaaggaagcccgacagttttatgaaaacaatgctaaaaaaaagtcatatctcaccatttataaaccgtgaaatagattgtagactttaatatatttaagtaataaggttttctcctagaataaataaaatcactttgcctccggttacatataaatttacttgttgtcatttcaacctattataacggtttaaaagccaagtatctattcataaatgaactacataatataccaataaaataagcttaatacatcattaatacattaaaatatccactacacgtaatctaatgatcaaaataatgggtccatcaattcaagtgaaaatcaacggtacacatatagatttaatctaatggtcttaaataatgggtccaccaatttgaatgaaaatcgacagtgagattaaatagtgccacatggcggtttagaagcgtttataagaacatcacgcggcaccttgggagtgtttgtaggaagtttaataaacttttagtatataatagatttgaatgaaaatcaacggtagattaaatagtgccacatagcagtttagaagcgtttataggaatgtcacgtgacgtattgggagtgtttgtaggaagtttaatgtacttttagtatatataatagatagatagatagatagattggcagtgatcgaccttgtgtaagcttgcaatagaaatttctacatttattttagcgttgaattataccattaaactatcttagtgttccattgaattgttctatcactcgttatgctagctgacatcacttaatttgtattcccattgaccaaatcctggatccgttcctggcatatatgctatctgttgattttccgccgcactaactaccgtttgaaccccttaggtgtgactgcacgagtgatttgactgagccatgactaagccaagcatacgatagtgaattgagacgttctagtggctagtactagtgtaatctccatgtatatattccttgaaaactcaaactacttttttttaatagaaaaaagtacgaattactctccgaactatcgcgatagtttggagagtggtaattcctactttttcctttttaatatataacattgttaaattatttatatatgttcaatcatttatcttattcaaattctatttacaaacatacaaaagttcaaattctttttacaaacgtacaaaagtaaaaaaaaaacctttactgatcaaatcaagtcataacgttgaattataccattaaactatcttagggtgtgtttgagaaaaaggggattgaggagattgagaagatacgcaaaacgaggtgagccattagctcatgattaattgagtattaattattttaaattttaaaaatggattaatatgattttttaaagcaactttcctatagaaatttttgcaaaaaacgcaccgtttagtagtttgggaagcatgcgtgtggaaaacgaggtgctttccccctcaatgtcctctaaacgaacgctgccttagtgttccattgaattgttctatcactcaagttatgctagctgacatcacttaattttgtattcccattggccaaatcctagatccgtccctgtcatatatgctatctttctgctgcactaactaccatttgaaccttactcccttcgttccaaaaacaagccaacctaggaggggatgggacatcccctcctagtacaatgaatctagatagccctttgtccagagattcgttgtatgtaggaggggtcgcatcccctcctagattgacttttttttggatgggatagggagtaggtgtgattgtgcgagtgatttgactaagccgagcatacgatagtgaattgagatgtctagtggccagtaatagtgtaatctccatgtatatattccttgaaaactcaaactaccttttttttaataggaaaatgtacgaattacccttccgaactatcgcgatagtttaggggtggtaattcctacatttcctttttaatatataacattattaaattttttatatatgttcaatcatttatcttattcaaattatatttacaaacttacaatagttcaaattctttttacaaacgtacaaaagtaaaaaaaaaacctttactgatcaaatcaagtcatagcgttgaattataccattaaactatcttaggctctgttcgttgccctgggtttctaacccctctccctcgtattccacgcgcaagcttttcaaactgctaaacggtgttttttttacaaaatgtttctatacgaaaattgcttaaaaaatcatattaatctattttttaaaaaaatagctaatacttaattaatcacgcgctaatggaccgttccgttttccgtgcgtgggtgatgggttcccaacacccaccatcgaacacagccttagcgttccattaaattgttctatcactcaagttatgctagctgacatcacttaattttgtattcccattgggcaaatcctggatccgtcccaggcatacgatagtgaattgagatgtctttccgccgcactgactatcgtttgaaccttactccctccgtcccaaaaaaaggcaaaccataggttctcgtgccaacgtttgactgtccgtcttatatgaaatttttttatagttagtattttcattgttgttagatgataaaacatgattaatattttatgcgtgacttatctttttaatttttttcataattctttcaaataagacggatggtcaaacgttgaacacagaaaccagggtttgtctttttttgggacggagggagtaggtgtgactgcgcgagtgatttgactaagccgagcatacgatagtgaattgagatgtctagtggctagtactactctaatctccatgtatatattccttgaaaactcaaagtactttttttaataggaaaaattacgaattaccccccgaactatcgtgatagttcggggatagttggggggtaattcgtacttttctttttttaatattaatatataacattgttaattttttttacatatgttcaatcatttatcttatttaaattctttttacaaacatacaaaagttcaaattctttttacaaacgtacaaaagtaaaaaaaaaccttactgatcaaatcaagtcataacaaaataaatgatgtttaaattttttaaatacgatgaatgatgaaatatatcaaaaatgtgtcatgtactaaaaataaagtatattttaaataggatattatttttaagatccattcaaaccaacattttcttaaaaacatgttcaatattaaatatatttaaaagtaactttatacaacgtagaagtgttgaccaaaaattcgctcttggctgatagtatcggatctgtgttggtgcgaactaagtcaacgaacacaacggtctgagagatctgcttagctccagtgtaggttgaaaatattgatgagatgcagatatgccagtcagtttgatcctgcaactgacaagatatgtaaataacagttcaaagagccgatcggctgacaagctgatgcagtaatcctagtcgatgccgataccagccgatgtttatcggctatatatccaatgtatattgtaataatgatattgtttgacggtattttgtacacacaagagtatctgggtaactgtgttggcttgaaaagcaaagcaagccagttattcagaaatttatatatgggcgaaccaagcacgtgcacttggtggcatgtatatatgcactcgttcaagctcagcgaatggctatagatgtttggcaaaccaacaagaagcagacctgtgttcaattaactctggcctgcatgcgcgtatttacgtccgtatatttcagtaatatggacaaggacaagcatatgcacgattaagcctcaatcaatcagcagcaaaacaatgaaatagaagcaaaacaattatgtgtgcatatatagttcatgcatgcatgggcaaaccatgcaaaccaagatgctatacaggctacgggctcatcgtgcatgcatgcgctcgctagtggcggccgtatattggtggcgtacgtatacgaatacgtggactactgggcctccatccatgctaggcccaaccgtgcagcaatccaatggatagaaatcacgtgaaatatatccatccaccagatgagtcaaagaggctttatctattgcagtgaagatcgcaacaactcaacgtggatcgagtcagggcagcgccatggattccgcgctgttcgttagggcttccccttacgcctatataaggccatcgacaccagcagccggaggaggcgggggccggggggcacagatgcagaacacagcggcaacgaagagtagatccatctacccatgaagagaatacacagaggcatcggaagagcacaccaacgtgtgcgccggcggcggctgccggccggtggcagccaacattcgaagaaggttcgggcagccacccaagagacggcgccaatccagccggcacaccggtgagaaggcgctgcacactggcttcatatgtagtttaggggatatctggtatggcggttgagatacacgaattagagtagtagtaaaagtgaacttattccttcatggcgtgtttacggcccagttcctggttcagttgctgaaaacgagcacaggcctgcagcccgttacaccgccagccaagccaacaacaattttcgagctgggcctccactgctgccatggtcacaggacgtgcggttgctagcgggcacacctaatgagcgggtgatcgctcgcgtccgtccccctactccccctctctctcccctctttctcctccccttcttctcttattactatagtaaaccatttttttttaaaaaaaaataaaaaattagaaaaatttatatatagaaatactatatataaaaaatttgaattcaaattcaaatttgaatcgggtatgtaaacttttgacttataaactttgggtctataaactttaggtgtataaactttagatgtatagaaatactatatatatagaaaatatttgaattcaaattcaaatttgaattgggtatgtaaacttttgacttataaactttgggtctataaactttagatgtatagaaatactatatatatagaaaatatttgaattcaaattcaaatttgaatcgggtatgtaaactttttacttataaactttggatctttaaactttaggtgtataaactttagatgtatagaaatactatatatataaaatatttgaattcaaattcaaatttgaatcggatataattcaaattcaaacttgaagcgggtatataaacttttgacttataaactttaggtctataaactttagatgtatagaaatactatatataaaaaatattcgaattcaaattcaaatttgaatcggatatataaacttttgacttataaacttttggtctctaaagtgaactttagatgtgtaaacttgaggtgtataaactttagatgcataaatttactaaaatagaaaaataatgtggtaccaaaaaaaaccaggtggagggagggagggggcacccgatggctaccccattggctaggcgatcgcccattagaggtttcggttgctagctggctagctcggccaaccagcgtcaacaccgggatcggccggccgcgtgtctgacggaaatggcaaattcaaagtttaagcagattaaaatcagcaactatagatagctagaaggagcatgaacgcatgattcatgcacagctgctcggtgcttcaactatacctgacctcacgagtcacacctgcacagtacgtgctacaccaactgctactcaacgatcagcatgttctatccttctatcagcatgacacatctatctcgacgatctcgtagaccaactcatacggagatcacgcttaaatgctaagcaatgtcgtcgcagctgcagctggacacggctaggcgaccaagcacaagcagcaaattaacaagcgtttcaacaagctggagatcatgaggagtccggagcagatggccggccacgctgtggcgccgcggcgagacgctgcgttccgcgcgacgacgcggcggactgtgacgattctgcacggaagctgcagggtgaggaggaggaagatggcggtggtgcggctcggcgacggcagcaggaggccgcggcggtttatgggggcgctccggaggctgcggctgcggtgggtggtggcggcgatgtacaggcgggcgctgcggcggctgcgcgcgtgctacgccaaggccatcagggacgtcctcgagggcgccgcgctcgtcggcgccgtgcgcgcggacgccggggtttgaatagtgttgcactttcatacatcttctttaatttgcatcaaccctcctgcattaatcctgcatgcattctgcgtgtcgaaagaatgattctgtctgtgcatggcaaacgtgaacaaattaagcaaacaaatttgacaacaattaggtttacaacacacaagtacaataatttgacaataatcctactttatttattaatgcattcctgctgatacaggaagtacaataattaggtttacactttacaacacacaagtacacaacccaaccatctgaaaagatggccttaattacgtactttgacataggaaacgatgtcgcatactcgcacgtcaatttactgccagatgacggcgacggggctcctcacggtgtgctggccatcgctccagaagatcgatccccacctgtacgtgttcgggccggccgccgatgccgacatggtgatcgagtagttcagtgtcttgcgctgcgcggtgaacgcgagcctcatcggcgacatgatcgcggtgccgggtggggaggcgatgttcacgctgtacacggcgtcggtgttcgtcccgacgttggtcacgctgcggcgctgcgtgagccggccaccgaaataaactcgaacgagaatgccgggtagttgaggtcgcgcacgcgcctctgcggccgggccgagtagtcggtcaccgagccgtcgttcgtgaagagcgagatctgcctgcgcgtgtagccgaggctgcagaggaaggtgatgtagtcgtcggcggtggcgtcgtacacaaggccagggtcgagagcgcggttaattggggtcgacatggccggagccgagctcgaacggcccggccggttggcccgtggacatgaacttgatgggtgttgccaccgttgtccacgttgtaggctgtcgtcatcagggccgacttgatcgccgccgggctccagcttggtcgtgccaccttgagcatggcggcgacgccacgccatggacgtgccatagatgatgctaaactcgacgcgcctgtcgtcgactctgatggagcttggcgggttttctcccgaccatgccgcgaggatgtcgacaccgggtgctatcatatccggcttgaggatctcagccgcgatgcggtttggcccacggctcgagaaggaagcgaccctcggagcagatggcgattggctgatcatggattcatggtgccacggaactcgattcttgcaaccggtctcgtcgtcgaccgcaggtaggaatagatctctctggcgtcagtgtaagagaccgtcactcctgggtggatgtcagcaaagggttggcaagaattcaccatagacatctctacttgaaatgatggtaccaacgccaccggctaaattgacagtggcttcttgtgcggggggagtggtaatatttctgccatactcacagagaacaatgttacctaagcctatgatgtcgctgagcttagagtactcgcacacatcagagccagcatcaccgccatatacaagtcgtgtcaatgaaccagccgtgttattgccagaatagagggaagtgccaacataggttcggccattgccaaggacaacgtgtgccgtgaaccgacggtttatagtcgatgctccaactgtcatcacccatttataatactactaattagtttcatcaaattaataattgaatatattttcataataaatttttcttgggttaaaaatgttactatatttttctacaaacttagtcaaacttaaaacagtttgactttgactaaatttaaaacgtcttataacctaaaacggaaaacggaagaagtatatcggtttcaattttagaaacctacgacaaaggtttaaggagaagaaggacgtactatatgcagatcatgcatatttttgccaacaacaaatggaataggttgtcctctcagtatctgtatatacacttgcgttacaaatagttctattatcttccaacaaacgggaaagtaatttcattcctcgaggggatgtctctcgtttcgtgcatgccacctaaatagacataaaaaaatttaaaaaaattagcaatatagattgatatgaaatatatcactccacaaatatgtaagtttaaattcaacttctacaaattgtaacaaaaataacaaatatcgctgcgaatgtacgataattatgttcagcttaatttgttgtttttgttgcaacttatagaagttgaatttagtcatgcatgtttgtgtagtgatatatttcatattaatctatgttctcaattttttttcaaatttttttataactatttagatgacatgcaaataacgatgggatgtccccttaacgagtggattctaatccctcgagtggatacccctcgtatacctttttcttccaaattcgatgcaaatagttgtgaaaaattctgaaaaaaattgacaatatagagtataatgatacctactagtccaccaaaattcatgttcaaattcgatctacacatcgagaaataaaaaagacaaatttagatataaacagtacactactattcatacactgaatctgtcttttttatatctcgacgtgtgagtcgagtttggacttaagattttgtgaagttgtatatatgtgttgtatgaatgttgtcaattttttccagaatttttcataactgtttagatggtttttgagcaaacgagaaaacatcccctcgagggattagaatagtttcctggatacttctgggcgttactaggaagcctgatcatgttgcccatcccaaacccggcacgtcgaaccccaaccacagtttgggccgtactcctcggcccgcgtggaactctccaacttggcaccaccgcacttgacgtggggctgtttggttggtggcctcagtttgccacaccaaatcttaggcgtgccacaattttctaggctagtgtttggttgcgtgccgcagttgagtcaagccacacttcattagcacattggcccacgcgtcatactctcatttactagccaaagtttgccatagttgtggctgtgtggcttgccacagttatggcaaatggagttatggcaaagttagcctccatccaaacagccccgagtgttcggtggtggtgtcttgcccttggcgatgaacatggcgacgcgatccatgagcacgccggtctcggcgtgggagctgaactccggcaagaggtggaagcagtggtccacgcccttggactccacgagcgtcgccgccctgtggctgccactgtcaccccacgcggcggcgtatcggcggccgcggccgcgcaggacgtcctccgtggccacggacaccagcgcgcggcggcacggcagcgacgctatcgcctcggcggaagggtcgatccggggatcgtcgccgttgttggccgccgcgcccgccgtcacgtacggccagagggcgtcgatcctctccggcagcagcatcggcggcgacccgcgcgtgcgccagcaggcgtccggcgtctcgcacggcagccgcttggtgccccagaagtatggctgcagcagtatcatgccctcgatgtcgatgtcgtcgtcgaacacctcgccggcacgtaccgccacgttgtgcacgatgttggcgccgacgctctctccggcgaggaacacgcacgagcggtcggcgtagtcgccgacccaggtgtcgtcggagaggcggcggcggcgggaagccgcccaccggagcgccgcccacgcgtcgtcgtaagccgcgggtacggggtgcgccggcgcgaggcggtaatccacggacacgacgaccgccgcggcgcgagcggagagcgactcggcgtagtcgtggaacatcctggcggaggcgctccccgtgcagaaggcgccgccgtggacgtagacgaccagggggagcctcctcccgtcgcccgcggcggcggccacggccgcgtcgacggggaggaacacgcggacggacacgccggtctcgtcgtcgatgacgacgtccttcgtcacgaccccgttcgcgctcctcgtcttgtcgtcggacgctgccacggtctcgtggcgcaccaagacccacctgcggccgtcgttgaactcgacaaggaacggccggagatcgacggcgatgttgccgcgcgccggcgccggcgacggcgagctcttgcttgttctcatgctgcaactgctggctcgctcttgcacgacgatggcttgcatggaatgcaaattaagcggggttcttatagagagagaggtgccgtgttggtgaagttctctaaacccctcgtgccattccaaacctaagacactaaacatagtttccataaactctaaattataaaaaaaactagtactaagatactactatttcaatacaaacacaactatttcatacttaaatttaataatacttatctcacatgatgtcttgaatgttgtgtagaaaccatgtctcatgcaagacatagtttgcttatcttttcttatttatattcatttgacacatcattttttattctatataacaacttatcctatcttactctaaagttatcccccactaacttcttaagcttaacttgcaaagatgccacaacatcatccactaattaacaagatgtcacatcatcatccactaacaatcatcacatttaaacatcatgcaaacatgctatatctttatagtttttataatttaagagcttttcaaatacaaacatgttaagttatcatccaatataattcacataatatttcaatgtaatgtatgttttatgatatcctatatatttatatagttcatcctcacttagttagtgcttaaatgattaatctatggtctaaattatcttttttctttttccctctaattaagtcatatcacatcaattgtttttaccctttagatgattaatctacggtccaaactatctccctacttttctttttccataaagtcataccaccttatattttacgtttgaaccaccattctacatactatttaaattaaaattatcataaaccacattaatttacttaatctgatgttatctagctatcttacacgttatttttttattgttatcatactaaattcccgcagcaatgcgcggggtttcacctagtttaatgcatggacaccatcctagtcattgggttgggaatgacctcataattaattttttagagaccttaattaattgattaattctcataacacaactaactgatcgatcgatgcgcgttcccatttctctcgatcttgcaaggatacgcgttccatttgaaaagacatataaacattcctagaagggaatatatagattcgcaggaagccaggaacaaatttctcatgaattaatataaaattgttgttgatgaacttatctgggaaaggaactgaaggtgatttatatataagcattaaatgttatgaagtttttgcataggaaaaacaaagaggagagatgccatacgtattcaaaaaccaatactgatccacgtttccatgcttaaaaaacatgtaggcttgatacctttcacattctcatgcaccaatattgttagagataatccatgaaatgccattgacaagcatctaagttctaaaaatgccattgacaagtgtgagtttcaagaaatgccatcgtataaatgattttgtctcaaaaatgccatcgctgttagggttcgtgccgttaaatacattgttcatcctataggacttaacggcacggaatggacggaaccctaacggcgataacatttttaggacaaaatcatttgtacgatggtatttcttgaaactcatacttgtcgatggtatttttgggacttagacgctcgtcaaaagcatttcatagattatctcatgttgttatggccggtacattttcgtagaagggcagtttgctggagcaaccttatctcatgaattaattaattcaagccatataaaataaaatcattatctatgaacccaccgggagaaggagagagaacctgggactgggaggaatgcgcgcgtgtttgctgaagcgatgcctatcgatattgtattatcaagttttgcatctgcaaaaaaaaggaggataggaggacagggaaatccaattcactgctacaaaaccattcttgcagataacccatcatttttacgaacaggctaaatgaagatctgctttaaaaaatacataagactcctccggttaaggttgtcttaaggctgcgttcgggaggagggatccccggcatgtaaaacggagcacgcattattacatgattaattaagtattagctattttaaaaaaaaatggattaatttgatttttttaagcaactttcgtatagaaactttttgcaaaaaacgcaccgtttagcagtttgaaaagtgtgcgggcgaaaaacgaaggagatggattgggaacttgaagaaaagaacacagccttagtagatttgctcataaaaatagacctatttttttcagttggtggttttgagtcaatccagtcacacgagtccaccacgcaccgacaagctattttaaaatcaaaggatgctaccctacctccgctcatttgttctttttctcctttgctctcaactcaatctcttcgttctttttatcagtctgatccgtcgccttaataaacatctaaagtatgtttttattatacatttattgctaaatttatagttttatgctatatttagacttaaacatgttttcttttgataaatttgattgtacatgttagtataagataccaatgtttggcaatgagataaacccttttaattaaattttaatttatattatgtataatttcaccatatccgtgaagtgataccaatttattatataaacctgttgttggtttacattttttaaatgatttctaccctttttaaatgtggatttgagcttacatgcaaatccaattttgtaaggtttccaatgaactagcggggtggctcatacacattgcgtgcagtctactagcatatatcatcgcatagtttttcatataatagtggttatactttagtgtttgaaaaaaaggtagaaagactttcgtatttaattgtgaaagaaaaaaaatgaaaatgataataattttgaactctgacacgtctgctccagtgtgatcaaacggtttacatctatattctggttaattagcatggtaatttctgtgtccataaagcaaacacaaacaatagctcaaagatataaaaatctaaggtattttgtttctctcattccaacactttcagactaatattggaattttttttcaccatctcttgggacattctttcaccaccaaagatgggattgtatattcatgatagttctcgttccaaataattaagaaacatctctcgctatcaacactaacttttaagattacaaatactcatcttcatctttattattagtttaattagtttaggaaagcttccaatatacatataattttactattccaaatttcagatatttaattgcttgtactctgatattttacatggacaattactgtatttttttcaatttcgaattttagtgaaaactttatgttacttttgggatttgtattgtaatcaaattgcttattttattaactttttatttggaattttaattaatccatgttgttcggtcgctgtccatgccccgatgagttgttgtccaggtacgtatagacgttcgtaaggccacggcatgaattaactactagctatagcctatagggttgttcaattattgcagttgctctgttactaacaaatctaagccgtctgttgtttcagggtagcatatattggctacgcagatcaacttccttttggataataatcgaaaggttttccagtctatgccatagacagcaaccatgcacgaaattgtgccttttggccatcatcaagggggtttaattttttattcaacgctgctatacatccgacggacgtgtacgaccagcgtacgactcaacggcgaaatacacggcgtaaacccaattgaattagcgatcgttgcagaagttacggacggcggatggccaatgacgtagtcgtacgctgtttgtacgcgtcggtcggacgtatagcattttcgtgttttttattccctgtagactgcttttaggtggtgggctgacacatcatccaagccctatatattctgaaaccaaaatcttcgagctattgtagattatgttgttcttatctcattgtctgcccaattgggtacaactgattggattctttctttgaaaaaaatggagccaggagctgtttttcctcgtcctccttagaaacaacaaggccagatgaattttgtggccgatagtactcgcatagaaattacattttgaaatttgcaacgatttccacattcattattaccgatctagatatgaatattccgtagtaattttagtacaagtttgaaattcaagtttaagcaaaagttatagtgtgcttgtgcaagcaatatgatccgtagatattactatcgtgtggtgtcaaccaagctatcgtcgccatgatcagggattcatgatgaaatttgcatattcaaagggaaaccttatgtttaaggtaagggcaagagctatactgatcaattaagaaggatgtagagtatgataaaaggcagaccgtaaaaagggcaacttaattttggggttgaaggtttcggcagtccaatatttaattatgaccaagaatgtaatattctgaaacgcctgagtcgggcgtgtttatgtgtctgatccttccccattgattcttcattgatgtgactgctattaacacttgtcaacatctcactcaagcaagcgtaatgtttatatataatatatatattcactcatgcgtaggttttcaaccaaacaataaaacatagacatgcctggtcaggcacaatgaaacaccagcttttctattacacatgcatagattgtcagtcaggtcacctaccaaacaagcccgttagcccgttgtctgtctgacacgtaaaatcaaacaaatttcttggttcgaaccaaagacatagaaaatgcatgtttactgacccactacataaatccatgtgtaatggagtcatgctggggaactcataatttcggtttgcaacctcatttagttctgggttacataccggaacacccaatccagtactaaagatgctcatctttagtcctgattgaaataaccaagaataaaaatggtaacaacaaccgggactaaagatggtagcgccttgtgttaccaactgggactaaatgagtttattttctttgttttttacctcttgcatattgattttcccaaatcaagttgctccctacatcccccaatcacatataagataacatcgtagatcaaatacatcataaattctaaaaaaaatacatcacaaatatatcacagataacatcatagattcacatcacagatcaaacacatcacaaattctaaaaaaaaaaaatcctccgcctaccgcacggctgcgccgacgccgtcgagccaccgtagctccaccgctgcgtggcctctcctctcgctggatctaacggaggggagggcgaggccgccgccgccgcttccgccgcccggctgccattgccgcttctcgagaaagcgagcaagacagagagaggcagcagacagagagagcaagcgagcgtgggagagagataataaataaaaggtcgtgtgggcagatcgagagagacgaggcaagagaggataagaaagtgggagagagaaatttagtctcggttggtgatatcaactggatctttagtcccggttggtgataccaactaggagtaaagatcgtttggggcctgacacggcctaacagctattgaaccgggactaaaaatgatgactaaagatcataaagtaccattggacttttgaactggggctaaagatattctttagtccctgttcctatttgaaaaggcactaatgtgatttttgtcattcgggcaaagatcacttctcctgatcggtgatgttggcccatgggtcccaccatcatatattattaaacttaaacgtggccgtacatcaaataaatcgattgacgttggatatgctccattgtactattgggggatgggctctgaaggaccctctgggtccatcggctcacccaaacgggcatttatcatgctcactttctctttgtcagaggggttccaccccacccccgaagggatgtggagccttcaggccacccctaaccaagccaggaccgtctacctcgtctttagaggagcaagtggatctggacccggggctgtggccttggagaggtagagataggaagatgaatgggagcattgaattttcccacctatgtggtcaaactctggttgcccgcattgcttgctgtagtcgaggccggtaatctcagtcttattatggatggtccagacccaagattcccaggattactgtcggcttgcgagccggcatgggctgctcggcggccctccaagaaatccctctatagtacccctctagaggggcccaccggtcagccagtaggcctagaaatgcctatatgctgcccatagccatagggctatggttgtaatcttccatgtacttagccctctataaaatacagtaaccgccatgttgaggaaggggcagatatttgattctttggcagacatatctgttggactttgttccaataggtactttcatgactcacgtacatctaaccttgcacaatcgtccttatctcttcatgcattgacaaatttgaggacaatttacttcagatttatttattaatgcatacgtgctgattatacagtagcagccaagcagcaagtgctagcggtagcaggaacaacgatgacaacgcgtttttcccgggttcatccatacagtactacgtatgttacgtttacatcatggcaccatctgagatgatggccttcaattactataaacgtacgatacaatgtcacaagtggtgatttatttccaggtggccacgacggggctcctcaccatgtgctggccatcgctccagacgatatctccccacgcgttgtatggcgagttgcttgaccctgccgacaaggtgatcgcatagtcaagcgtcttgcgctgcgcgttgaacgtgagcctcattggtgccaccgtgagcctagtgccaggcggcgcggtgatggtcacgtcgtacacggcgttggtgttcgccccgacgttggtcacggtgcggcgttgcgttacctgaccaccggacctcgcaaacaccatggagaatgccgggtagttcaggtccccgatgggcggccgacgtgagcagtaggtcgtcgtgctgtcccttgtgaaaatcgctatctggtttggtgtgtagccaaggccgcagaggaaggcgatgtagtcgtcggtggtggcgttgtacacaaggccagggtcgagagcgttgttggggtcaacgtgaccagaaccgagctcaaatggcccagccgcccgcccattcactgacgacatgatggcgttgccgccgttgtccacctcataagccgtggtcatcatggccgatttgatcgccgtagggctccagtctggtcgtgccaccttgagcatagcagcgatgccgctcacgtgagggcacgccatggacgtgccagagatgatgttgaactcgacacgcctcgtgtcgatgctgagggagcttggcgagttttctcctgtccatgcggcgaggatgtcgacgccaggggcgattatgtccggcttgagtatctcagccacaaagcggttaggtccacggctcgagaaggccgcgaccctcggagcatatggtgattggctgatcatggtgccgcgaaattcaattcttgcaaccgggttcgccgccgattgcgtgtacgaatagattgcattggcgtcagcgaaagtcactgttgatgccgggatcaagtcgggtgaactcaggaagaactgaccatagacatttctacttggaacgatggcaccaacaccaccggcttgttggacagcagcttcttgtgcgggggcatagccgatctcgcaaagaactatcttgccaatgactatgttgcgagagagcttcccaggttcacacaatctagagccagcatcaccactgtatactagtggtatcaaagaagcagctatgttccgacctgagtagagggaggtgccgacataagtttcgccatttccgaggataatgtttgctgggaaccgacggtttatgcttgacgcaccaaccgtgaccatccatggtgcaaggttattagcagtagacatgtcagggccgtcgttcccggcggcagcagagacaaatatgcctctgcggatggcattgaatgcaccaacggacgtgggttcattgtagagttgttcactccgaccacccagggaaagagatatgacatttactctatctgcaatcgcctcatccatgcccgcgaggatgtcagaatcataacatccttttgcccagcacaccttgtagatggcaatatgcgcacgcacagccatgccttgggcggtgccattggcatagccaaataggttggcgccagggaccgcagatcctgcggcagtagaagcggtgtgcgtgccatggccttcggtgtcaagtggtgactttgactcttgcgtctcatcgatggggtggcctaatgcagcctcgtaccctctacagaaatactttgcaccgacgagcttgttgttgcagtaggcagtcgcgttgaaggaaggggttgagatgcagtggccacggaaggtgctcggcggcggaggcagtgatgggtcaacggtaaaggacctacggttcttaggataaacaccagtgtctaccactgcgatcactgcaccagtgccaccatcgttcgatgcctgtacgaggccgttggacggtgagaggccgaggaaggagggagacagagtggtctgcaactcattgcgcttgtcggggaagatggcaaggatgctgggatggtgcacgatgtgtgtagcctggtgcttcgctagcttcgcggcaaagcctgtggccgcgtgggagtatgcatagacaaggcgtggtgttggctcgcttaagtgagaagggaggatcccttggagaaaggaggtgtagtgtgcaatggcgtgctggtccatgcattgcgaggcatgagttggaggtgtcgcatgcacatgtgcaacatgtatgatgtaggtggatacatcatctgttgcatgctcaacacctactgatgttgctaacactaaggcatgtagcaagctaaagacgaccaagagtgtcttgcccagccccatggagacaaatgagatgtccggatggaccatagaaatttgtttgagatgcatggtgtgtgttgtgaattggtgaatcttatgataaaggcatcaaggggtatatatacaagcaaaatagtactattctagctacataatgactttgagaacacttcatagatagattagatggactttcatctgtttgtattttgtacttcctaacgagggagggaaaattttcaaactttgcatgtgcactctccgtaatatagatacttgatcattttaggtggaaaagtttttcaaaattttgccttttgttagagtctttaacctatgattcacacagtcaattgaatttttagtcatcaacatattgataagaataaaattaatcatatgagtgaatgaatacttagctatcagtggcgtagccaggaatttttccttgggtagtcctagttcacacattcatgtcacatggtaaaattttattgcaccataaaactgatatacaaatacaaatttagtgaaaatactatagaaataatgtcttccaagatccataagcggcttacttaacaagcaagttcaaaatgtgcaaatattacaacatagagagttcaacaatcaacatagatcttacacataaataaaaaattaaaaagccactaatataacaaattataaatcctacaaacaatagcaattagcatttagcacacattcattaatctaacaatttataaattgcattctcactttcttagttattcacacttcacagactcattaattctctaatcacaattcacaaatctagccatttaggcagctatttcttaccagggctgagccacggaggggaggggacggcggcatggcgcagcgtcggtgactcggcgcggacggcggtggcggcgccggcgcggacagcagggagccggccagctgaggacggcaccgggcgccggcgcggagtcgaggtctcgaggaggctggcggctagcggcgtcgggctcagggtctcgggcgaactggcgctgctgggcgctggctggtggctgagacgctgagggaggggaatcctccaaccctagatgtttctgggctatttgggcctaaattttttttttgggggggggggtgggggtctctgggccagattttggggtagtcccgagcccacagggactacccctagctacgcccctgacttagctttaatattttatttggattaaattttaagatattatgaatgcaatttgtctatgaattgaagcatggcacaatgagtcttaaaaaagtaattagtcaaacttgatatttatagagggaattgctagttttcatgtgactgagatttctctcaatctccgtcacctcatccatttccattggatttcaatccaatggccagggaaccaagttccggatgaggaggagaagggagagaaaaggggtaactcatcaatgatagcgacaacgttaacgatttcgtgttagtgtggggcagggtttagagtttggagtaggagttacgggaggaagggttggaagagcggagagagaccggctggagggacggtttcccatgacacggtaagcgacgaggtagcatcggcgttgttggtttagaggagggagcgggaagagcccaatttggcaaaccttgccagcacttggtggcgcccaaaaatgctaatgtgcattgatcacgcaatcagtttctatacgtacggaatatgcataaaaaaagtgtatatatatatatacaaattttcatatgtatacatataaattttgtttgtatacatacaaactttgtagtatacatataaagttttgtacgtgtatgtatatttttcatgtaatttatatgccacgcataaaatttttacacacaatatttttagataaatatacagattttatacgtatatactttgcatacattcgtgcatgcaaaatttatacatatgtatacaaaatatatacatatgaatatatacctataagaccaaccgaccgtgcggctgcgcacgcacggctggtcacatatcagcggcattcggtggcgcagcgccaatgaggtcgggaggggggatgaggtgggagaggcaacgtcgcgtgaggaaacgagcagtcaagctcgcatgcattgcagggtggaaggggaaacagatcaggtaaaatatccatgatgcatgaatcttgacacgatatgagccattcaaaagtcactgaaatctctttggtattttcgagtgagaccagacaccccgttatagtaaatcattgtatggctgaaataaatctaaatattacttcatattttatatttaatttggtcatgaccaaaaactgaactatatatatgaccaaattaaattctataaagttccaaaaacaattaaatactcctatagaattaatacttccaatcaaatagttcagtcactggtagagaaatcatctttggtcggtcgacccaaatccacaatagtctcggttccattaaaaaccgggactaaaaatgatttttagtcccggttaataagaggaagatctttagtcccggttgttgttaccaaccgggactaaaaatcatctttagtcccggttggaaactttagtcccggttgattccatgtcaggctgtgttagggccctatgatctttaggtttttagtcccggttggtgttactaaccgggaataaaaatcaaaacacactatataatctatagtaccgatcctcttttcccgtccacacaacaaactcctccctctatctcttttttaactctaacttcttatctctttccttatctctaactcccctcctctccttccttttttccttcaccaagtgcaagcggccggcgcggaggcggtgacgcgggggacggcgcggaggcggcctgcgcggcggcggcggcgggcggccggcgcggcggcgccgggggccgcgcggaggcggcggctgcggtgggcggccgctcggcagcgtccggcgcagcgccggctggccggcgcggaggggaggaggggaggcggcagtggccgccggccggatttttttttctttttttttttgagatgtgaatctgtgatgtatttttatgtgagatgtgaatctgtgatgaattttttagaaccctgtgatgtaattttttttaagagtttgtgatgtatttggagaagatttgtttgagaatttggagatgttctgtaatatgtgatgatttggatatgggaggggatggtgtgaaatcaatattcaatattaaaaacagaaaaaaaaaagaaaaaatatctttagtcccggttggtgatgctccatctttagtcccggttggtaacaccaaccgggactaaaaattgatttttagtcccggttatttgaaccgggactaaatatagcgatcttttgtcccggattcgtagtcccggttggaaaaccgggactacagggggttacgaaccgggactaaaaagcatttctccaccagtgagtttttggtcatatgaccaaattaaattctataaagttccgaaaacaattaaatactcctatagaattaatacttccaatcaaatgtggaattaacggcaagcatgttgggttcttataggaatccaccactcatttctgttcttctattgtggtttcaatatttttgtaacgcagaattgagctcttatacatatctaattgcgtaacgctttcgatgatgcttgctatgccgactttaacgaacatattgttcacttgttcagcgttttccattccttaatgattatttaggtttgtagagcaactagctgaattaaatccctagatgttattgaattgttgctttgttgctgataagttattaattacggacaagctaatacatcaattgttttggagagctttagctatggactatggtgcctatgcatgtatactttcttttagataagagaagtcagggctatatcctttgtgctataaactgtaactgtctataattctaaccagaattacgcaaaattcgtatgaatggcctataagagtgctttaggtggcgcaccagaacatcgttcgattcaagggcatgttctaaaaccagcttttcgatctagttcttgtagattgtgatgttgatagtttctagattatcacatcgtggtccgttggtacgattgatcggattcttcatgtccttcgagaaaaaaataccttagaaataacgacgtcaaacgaagtttgtacttcattaaggtacttgatacgacacattctgaaatttgcaatgactttcccactcgatgtcaccgtactaggtaaaattggggaccaatcaatccgtgctaacttaggtacaagtaggggtgtaatgggcctaactttttaatctataaaattcaaagggttaatctaaaaagcgtggtttgaaattttaaactttcgaggtaaaagtatttaagggatgagttggtttgtgaacatcccataaattctaacccattaccacctctaggtacaagtttgaaattggagtttaagcaaacctaagcatgtagggatacaagcggtctactctgtcctttatctgtgcaaattaaatcccatttttcgcgtgcggctgaaaatctcaaccacacgtgagaaacaaacgcacccgaagggacgtactccggatatgcacacctagcctggcatcctgacccatatagactccgttggcctatttgaacttcttacaagcgagatgatgtttatctcgttctaggttccaaccaagccgaatatttgcaggggtgcaaaacaactcgagggtggcctagcccatccaatcgctgcggcggctgcctgagcgcattggcatcacatccatctctatcttcgaccggtgcaccggtctagccgagtggtggagtgcccacaccgcccagtagctccacctcgcttgtccccactgcaccacccattgacggcgcaccgctcggctggcagctgcccaccctcacggcctcaccgactccgtcgacgaaaggaagacacgctagctaactcgcgcccttaggccttacctgtccatcgttgctaccttttattttctactccatcctaaaatataagtgggataaaaattgaacagagagatgttgcatgcatagatagataaatatgatgtgtgctgagaacttctaacgttttaccacgtgtccggcgtctggaggtaagcattttcggaaggaagtgaggacccctctgatgggaagaaaattatacaggacctaaagggaaagtttggcactctgcacttgagctcatatagaagatgactacatcaagattcgtgcggacacatgacactccagatgaaaagtctttctagatgggtataattttcttcccccgtatgatggaccagacatctaaagcctggcccaccgggcagggactccccccgtagacgtgggcacaacatccgagaacactgggtataaaatatagatggccaaaaggtttgctcgtcatggcccagcccaggcacggcccaccagccaacgggccggcacggcccgatcggcacttcgtgccgggccgcgccggcccatgggctgcacctcccgcccaggcacggcccaccagctatcgggccgtgccggcccgaaggcacgggtggcccatcgggccttttttaaaataagtatattttccgtcccttctctttgggttgttacatatgtatagctaaaataagtctaatttccatccctccttttttgggctgacatatgtatagctaaataagtctacttttcgtcccacctctttaggctagcatatgtatagataaaataagtctattttacatccctattctttcgtccatggcatataatatgtctatttttactcccctattttttttatatcgggcctggctgccggcccatcgtgccgtgctggcctggtcgtgctgggccggcccaacgtgccggtggaggggcccagacacggccggtattcaggccgggccggcacgggcctgacctccgtcaggccatgccgtgcttgggccggaccaaaatgccgtgccatgggccggaccgttgggcctcgggccttttggccattataaaaggctcctccccggaaaacgctgccccgccctgcccccattcccagatatagaaaacccacgcgaccgccgcgagcgcgaagcaacaaaggcgcgcgcgataagacgacgcgctgaggagagagaggaagaggaggagcgcccttccctttcccctccacccgttcgtccgatcggtcgccccggatcgcgagccagctagccgatcgccatcctgcaggtatggtcggattccttgcgatcgcggtgattttagatttttccttttcttttctgcatgtcgcgtcgccgctgatcgggggcggctttttcttgtttttgtttttgggtgcgggggatagagggatcgattaattcatcatcattcatgagctgctgcgtgtggcccaaattgatggcattttgaatttccttagcagagtattagtgcgtgtgtgtgatgcttttgccttttgctaaaattgggagaatgcgggggatatgcctctgccgtgttcggcggaattaccattcggtgtgagcgattgtgctgtggtggtagattcgatcgtttccttggtagccgcgtgggaggtttgccttgatttggttaattttcaggtgattcgctccgatgcatgtgagatgtaactgatgcgaaaaatgtttggccaatgctcttacgatgttcagaacccggcttggatttggagcgatggtgcatcgtattcgctttgtggatgagtaatggtggagcctaagaaatcccgatgacgatgggtgtggtgtcaagggaggtattgcctgcatgcgagaggctttgcttcctttgcccgtcattgcgcacgaggtctcggcatccggtcaagcgatacaagaagttgctctcagaaatcttccctaagtcacaggtgaaacccgctgtagatgttcatggataaattaggctttgttctgtatcctacatttgcacattatggatcatattgtgtagtttgaggtttgcttatttcatcctgatcgatttgttggttccttaggttccttctgtatcatactccaacagtagttgcttattttagtatctctcgttgtagtacagattggtactaataacgcaattacaaaaagaagaaaatctatgttcggcaagttctactgttgtatatcagtatatgtgcacagttaaaagttaaaatacatccccatataaacctatctggggaagcgagagtaacacacctataaatgttttctttttctttctttttttggaaaaggctataaatgttgtcttgttcttttaggatgaagaacccaatgaccgaaagatcggcaaattgtgcgaatatatttcgaggaatcctttgcgtgttccaaaggtgtgattctctttctcatctcttttatatattatttcactgccatgattcatctaataattttagaaagtgaattattatcgagtgcttattaatcatcagaggaagctgcagggcatgcctcattttctgttcatatctatatccctcccaaaagtcaatcaattgtgcaacatgctgactttcttagttaaaaccagtgggtacttttcatacagaacatttgggcatgccttttttcacatatctagctttattctgatggtttatgttcaatctgaagcaaggtatatcctaattttcttctagaaaaaagatatatcctactttaaatctgtaaaaaaatcgtattttatagaaaaaccaatgatgtattatcaaaatttaagattttggagttacttctttcccctattcatgaatttgatccttttgtcttcattgaaaattgttcttgcactttgacagattacagtttatttagagcaaaaattctacaaggaattgagagttgagcattttgggtcagtgaaagttgtcatggcaatttaccgaaaggtgatatgttcttgtcaggagcaactgtaagttatttttgcttataaacatagttacatacttacatgtgctcccttgaatatattgctgaaggttccataggcaatgcgttggatttccgtaatatccatctcttaacaatttcatcatactgcaatctattatataattaaaggaatagaaaaaggagcttccacgttcgctctcatagcctagaaattctcgtattaatcggagaaaaagaaaacagagtccatatagaaatacaatttagaaatagctgaaattcggaattaaaaaataaggaatattagaagaggagactagagtccatatagaaatacactttagaaatagttgaaattcggaattaaaaaataaggaatattagaagaggagtatagagtccatatagaaatacaattagggaataatagaaattctgaattaaaaataaggaatattagaagtagagtatagagtccacatagaaatacaattaggaaataaccaaaattcggaattaaaaataagaaatattataagtagagtatagagtccatatagaaatacaattaagaaaaaaaatagaaatttggaattaaaaaataaggaatattagaagtagagtatagagttcatattggaatttaaaaccaactaaaattcggaataaaaaggagcctccacgttcactctcatggcctagaaattctcacattaataagagaaaaagaaaaagcagagtccatatagaaatacaatttagaaatagctgaaatttagaattaaaaaataaggaatattagaagaggagactagagtagttattacacattagtagttttgaaaagttattgcaaaatttaaaagagtaaagtacacggccggtccttaaagttggagcgatgtgtcacttaggtccataatctaggaaaatcgtcatttgggtccgtgatcttgtttaagtgaatcatttaggtccaaagcgcctttgaccaggttgactggcttacgtggccgtccacggtgacagcatatttgcattttagccccccgcatcttggctctcccatatacgatccaaccattctcccccaaatcctcctcggctcctcctgtgtgatttctagggttagcgattgcaacggcgattgggtggcggtgtagatgtggcggcggccgcgaggacgacaacgacgatgaggagggaggcgcgtacggcggcaacggtaagggagaacaagcgttcgtcgtcctcatggtgtcatcagcggccgcgtcggcctccacctccgcgacggtgtctagctcggtccccgtggggctggcggctaagaacctgaagtcgatgcacaagggcgcgcaggacctcaacctggcgttcccgcatcaccacggccgcgccctgcagtcgccggagttcacagcgttcccgagcttggagagtagcaacatgtgcaaccccggaggcaacatggcggtggcgaacggcgttggtggcaggggcagcgtgggtgcgtgttctcggcgatggagttgctgaggagcattggctgctacgttcctctgcctcagatggggccgctagggatgccggcggagtatgcagccgtggggttccatctcggcgagttccgcatgccgccaccgccacagcaggagcaacaacaagctcagaccgtgctcggtttctccaaggacacgcacaacgcgggtgcaggcgacggctccggggtgttcggcgggtgcagctagtggctcatgcatgcacgcgtggtggtcagcaactgacaacatgtggagatagagaaatgagatagagacaagggggagccaagatgggaggggggctaaaatgcaaacatgctgccaccgtggacggccacgtaagccaatcaatccagtcaaaggcgctttggacctaaatgattcacttaaacaagaccgcggacccgaatgacgattttcctagatcatggacctaagtgacacctcgttctaactttaaggaccggccgtgtactttgctcaatttaaaattatgttgtcattgtaatatattttaataatataatgagaaaacatatatgttaatatatgagagaaaatatgatgatgctagccgcgcaatctgcgcgggccaccatgctagttaaattataattttatcaatgataattttgtttgctttaaatacttaatttctggtgtggcaattatattctcaattatatatatatatgtattagtgttttttttgggtgaagtcatctatttgggtggactttcctctggcaatcagtggagtttacaagatgtatttgttgcatttcttttggttatattagtgtgaataattgctataatggatggaccgctgttttgcaggcctcttttcgccaatagcttgctaaacatcgtagaagccctattggaacagaacagacaggatgacttgcggacaatagcgtgtcgaacacttttttactttgtaaacaaccaggtattttaacattcgggtaggcatcaatttacaaggtgaaatggtcttgacatttacgtgtatcttccgataaaactctcttttgagaaaattttgagttctgttacatcttctcattacaggttgacagcacatacatgttcaatttagagagccaaatccctaaactatgtcaactggcccaagagatgggtgagaaggagaagatatccattgttcatgcagctggcctccaagccctttcatccatggtacctctcctgttatgccttccttgtgttgctgtaggttcatgtttatcttgttctctgcacggcgctttttttacgttgccaaccaaacggatgatttgctgataccatcctgaatcttttcaaaatgtttctttcattcgtatatcatactaacattctggctcgttttttaagggaattcagaattccattaaatagtacttccattctaaaccatccatttcaaccgaattacatgttggaccatatatcgttaccaaagtggcaatttggaccgagtctgaagttcatgttttcactttgttttagtttgggccagcggtccacccgataagtgagaaagaaatggaggcggcactttggtaacccataacggtttaacaaaccgttgggagtgtgattaccgccatcttataatttagaaaattacatgattaccgcgaggtatactatcttttaaaaaactgaaaatgttaccacacatgataaccgcgacaacctaaggatatcttcagggcaagtaaaacgaaatacatattattgtatgattagttaagtattaacataatttttatataattttttttaaaaaaacatatcgtttagccgtttaaaaagcgtgtatgtggatatatatatatatatatatatatatatatatatatatatatatatatatatatatatagatagagagagagagagagagagagagagagagaggtggcttgggaaactgagaaggttgagctgggaaaagtcggaaaaccgacgaaaaacgagagttttcctaagaatacacagccggcaatctcccccctttcgttcccatcgccggcgccaccaagggagggagtcagagcttcagaggggaggcggtgcttggtatggaagcggaagtcgtgctcaagggcaccttctcgctgtcaggcaaccgccacttgctcgccgatgtagctcgagcacggagatggagctcaagtatgaggtgacacaagcgtagatgagctcgagcacgggggaccgttgctccatctgacccaatgccgggatggcggctcgatttggaagggagtaggagcagatggcggccggctggctgatgtggaggagagcaagagggggcaagtgccggagcctgggtcgcccccaagatcgatctcctcggcgaccaaatagctcaccgtccacctccatgcccattgcttgagagcttcgcccgccgctaacacagtcccctcgctcgagctcaacctccgttttcccactacccccaagtatgggcgccgccgctgcctgggatgggaggacaccggccagagttttggtgggagagagatggagaggaagaggcagtcagaactccagagtgcaacgaaatgcaatttcatctaatcccagagtgaaaacattgttgaagcgctccagaatgaaactttggtaactttggtaacgataggtgcccgatgtgtaatttttctctcattttatcacctcaacaaacattggaccttgcaccatgctgcctagggatggatttatctatattccctctcaacattcctgcaaaaccccaaaaagaatgttctttcgttttctgctctgctacatattcgtcgcttgctatttttaccgcagaattttcatgcctaatacccactggtatggattgcaggtgtggtttatgggtgagcattcccatatctctgcagagctcgacaacgtaagtgtggttttttccattaagctggtggcgataaaagaatcatacgaatatacgattagttcagcacaaccttttaatttcaaagaacttttaatttgttaccaatttgagtaacaaaaacaatttatgaacctttaatcgttccatattataaattaaaatagattatctgagcaagaaaccgaataccttatggcttgcacatgccttctttacctcctagtttatcttccttcagacctcgtaacacaatgcttctacttatgtcaattaatcgttaactctactgagaccacatgacctaaggtccacagtgatgtaaccagaattattgccattctgccaacctacctctattctcagacatcataatttgattgcacaggttgtctctgcagttctggaaaactacgagagcccatatgcaaattctgataatgatgctgccattgaggatagaaggactcagtgggtgagtgaagttctcaaagctgaagatcatgaaccttccggtattaccattttgacaagggttccttcatggaaagccattagagctccccgcggtgaattaagcctgacaacgtaaataagtttagtcatggaatttttttattttcatgttatattaagcttctctatgtcttatctcttttaaatcattttcccaacacagtgaagaatcagaaagtccaaatttttggtcagggatttgtctgcacaaccttgctagaatatccagggaagcaacaacagtccgacgagttctggaagctatatttcgttattttgataacaacaatctgtggtcgccttctaaaggacttgcattgtgtgtccttttggatatgcaaattgtgatagagaaatctggtattcagtgcttcctgaatcttctattttttttcctttcagatgcattcctcttatttgctgtaataagttttatacttctatggtatttaaataatctacatgagcactattatcttgaatagttgcttatgctgataagtgatagatacattattggctgacaggacagaattcacatatattgttatccatgttagtcaagcatcttgaacacaagaatgtattgaagcagacagataagattctggacattattgaggtcacaacacgccttgccgagcactccaaagctcaatcttctactgcactaatggctgcaataagtgatatggtcaggcatttgagtaaaaacatgcagctcttggtcagtgatgtaggtcctggggatggcatggttatgaatgacagatatgggaaagctaccgatgaatgtcttgttcagttgtctagaaaggtcagttttcctgtgaatatgttttaccagcataagtgcattgctttatttccttttagctatgcatatagctgcactctacagatcattttgcacccaccatccatgtaggtgctccttcaattgatctatatactcttcaggtaggcgatgctgggcctatccttgatgcgttggctgttgtcctggagaacatttcaagtactacacctgttgcccggtccactattgctgcaacatatcgtacagctcaaataattgcatcattgccaaatctgttataccagagcaaagtaagttgatttacaatatttttattcctttcttttatgactctacaaattgttcaacaatatatactacaccttgtaggcatttcctgaggcgttatttcatcaattgcttttggcaatggtctatccagattgtgagacacatttaggggcacatcggattttctctgttgttcttgttccttcttctgtctctccatgctcattttcaggctcttcacaaacaagcaagattggtattaaaaggacattgtctaggactacatctgttttctcatcttctgctgctctgtttgggaaattgaaaagagatgtgttttcatttcgtgaaaattcacgcctggatggcactaatctaatccctatcagtgagaattcagaccagataaacgggaatgatccaaaactattcaaatcacagaccattcaaaggatgtatagtgcaaaagatagttttgtaacatcttcatcagaaataagtaatttgagtgggacaactcaggaaacagtaagtgctagactctgatttcttgtagctaacatggttatttattaactgtgcctctttctggtggaaaaaagaatgtttattcatttacacgcaggatccagtcaccctcatgctgagtggtcgtcaggctatccttctgctttcctccttgtggactcaggcactttcacctgaaaatgttccacgaaattatgaagcaatttctcatacttattgcttgatgctactgttttctgaagacaaggtgagagaacccattggcccattccctctacttcatatctgtattttgcattatcgtctctattgccctcttcctctatgtatagatagaccttgatattagggattatgtagtattcacgtattgacaccatttgcaaagctcgacttaatgagcaatcaacttagcacaggaaatgacaacataaagacataaacgatcacatgatatagtaccctccatggaatgttgggttataatacattgccacttgtcaatcaaatagtaattcatggtaataacatcttttctcttatttcataagcttttgaatggttgccagattatagatcaagaatgaccatgtttcagcacttgcacaattaaatgttaatataatacataatataatgtaataatcatccatatttttttctgatgtgaatatttaatctgaatgtaactttccatattaaattttgctgatcaatttttatttgatttatttttattgcatctctctgttacttggcttaattgccaccctattgcagaaatcatgtcttgaagttcttgttggcagctttcagcttgctttttcattgcaaagcatttcattacaagcaggtacacaccagtattttattcccatcacagtattggatcttacttcacaaagcaacaattacttttttgttcatttgttctctgtagtgattgttcggcttactctatgactcttatcatagattctccatgccatgctacaagcaatagaagtaatgtgctgttatgtaattccttcagaagttgtatattcataatgcattcgatcaacatgtttttcaggttttttgccaccatcacgcaggcgttcactctttactatggcaacttctatgcttgtgtttttctcgaaagcttttggcattccatctctcattcctctagtgaaagatttgttgactacaagcatagtaagtgaaattatgcttgcatagttcattatgatgtgcatggtgatctagtgagcatttttaccatcaatagatagcccttggagagattatgtcttcgcaaacaaatttacataaatttgactaacataaatacataatcaaaccatacagataaatgtctactcattcgcaaacaacaatatgtaatttcttaatacaaattcttttggagaataattgaaattgttgagtgaatggttagcatactctccctcagttaaaagaatgagacacagttacccatggcacatttgcacctaagttcttgtgtactaaaagatgttttgcagtcaataccagatcaattctaaccactgtgatgccataaaaaaatctacttttgtcagttgcaaattaatctctagaatgtaatgttaaatattgaactgagttttaagtggagcctttgatgcttagaatatctttatacaaagatgcacaaccctcttgcctattctcaaaacattgatgccgtgaatattttatcattttttcacatgcgtgtggttatccattttattttaagatgtcatatgttgtgttactatctgataagcaatgtgtttgccaggttgatccatttcttcgtctagttgaagactgcaaattgcaggttgttgagtcttgcttgacagtttacggttcaaaagacgacgatgatcttgctttgaaatctctctcaaacatcaacatcaatgatcagtcaaaacaggcatcagtttctcttattctcgatagtttgaaagatttatcggaggtaaatcacaagaagagtctgatgaacatttgtcttgataccttttattgctgtgattgctaatttcgcactattggtggtaccgcaggctgaattgtctactataagaaagcaattgcttgaggagttctcagcagatgatgcctgtcccctgggttctcactcgaatgaatctacttcacaatctcctgcatataatgctaagttgcaccaaaaatcgttggaggtgatcaaccttgtttacaaacacatgccatccttttattcttgttttcttatattactgtggtaattattatgcaggttattcctgtcggctttatttttgaggatgataccctagttgaaccagctaacagcttagcagaacctcaattgcaacaacctttggacaatggccttattgatgtgaatcagcttcttgaatcagtatgtacttatttcccgcttgctagctttactctgcttaaaatatgattaatgaaatatggaggtacccttattaatataatcattcaatcaataactatgaatatggaatcttactcgatggtaaaactgaacattttcaagatgtactgatatatgctaaaaagaggttataacttccgcaggttgtggaaacatctcggcacgttggaagactatcagtgtcaacaaaccttgatttgccttttaaggaggtagcaaaccgatgtgaagctcttttgatcggaaagcagcaaaagctatctgtctgcatgagcgtccaccaaaaacaggttagtgaccttcagaaagatcacagacaacttgagatgtctacagttaaaaagatgaaaatggtacagaacactatttgtggaatggggcagttagactatgttgaatggtaaatcggtgcattttgaaatctcatgaagtgaagcaagcagccaagcactcttccgttgtaggagtatgtaataaagaaataagttttacttttgcgatgcttgatatttcagcagatctaataggtaattgtaataaaggtaaactaaggaaaaatatgcttctaggctttcaatatataacacaatcatacctttttagcttgttagttgttattgtgggaacctgaattgcacacgattctctcaaggtcataacatatttgacttttctttggtctttcttctttttttgaggtgaaagtctttcttctccagtttacactcacagattcttgggactttgcaggatggtgaatcacccatggacaagcttgggtcacctcagcaaatttctccaacggctgggtttgtatcaacgaacgacgagcaatgtcactctgatttctgtaagctgccggtcctgagtccctacgataaattccttgcgggctctggctgctaagatgaatgttacttggggaatcgaagaacacagcccggcaaaaagaatcgaagaacacattgttggcccaatgtctatcgactaacaaagaaaggatacctcaaaaccttggatattcggtggtttcttgattcatgccttcatgtatccttgttatgcaagataagataattgtttgtatctgggctccccgttttgtgtcacgtgttgattcgtacatggcagtaagttcatctgctcaatcgggcaacccttcttactcatgagaaggaatatcaattttggtgattctgtggaaggaatgaaatactgtcagctccaacaatggccttcttcgtctgcagggtacagcctatgcattcgctgttgttgacacaagacactgtacaggctacaacgcgcagccagccatggggaatgcagcagaacgagcccaaatattgattttgttgttgttattgttgatagggtttttttagaaacaaatcataataattgaggttttatattacggattcttcaatacttaaggttttgtgaaacttactagatttaagaagttacggcaatttcaaacaaagcctaagtggttgtacacttttatgtctaaattgactttactaaatttcagtagtgccaaattttggcattgtccaatactgtttacgtcacaaaatatgactatccagtactggatgtgacacattctaatactacgaatcgagacagaagtcatagtattaacatgtgtttcatctagtactctctatttcatattataagtcgtttgattttttttcttagtcaaagttctttacgtatgactactaagtttatagaaaaaattagcaacatttataacaccaaattagttttattaaatttaatattaaatatatgttgataatatgtttgttttgtattgaaaatattagtatatttttctataaatgtgatcaaacctaaagaaaatttttttctttaatgaagaaaaaatcaaacgacttgtaatatgaaacggataaaatactagataacaacattttcggatagaggaagaatttgataaggctatgatgtgcaagctattacctttataagtttttatgagaagaagattctaaaattaccaaatcttaagagtcaacttttgacaatatttagatggttacatttgctaaattttagctttaaaatgaacagccccctaaaatcaggcgttggacaggataacatcgtgagaaagtttgtttcgttttccgcgcacatgtttcccgaactattaaacaacgtgtgttttgcaaaaaaaaattctatataaaatttgctttaaaaatttataaataatttatagtcaattaatcatgcgctgatgactcacctcgttttgcgtattttcctctcttctcaaactcacccctaggccgtgtttagttcacccccaactacctctaactttcaactttccatcacatcacatcatcacatccaaaacttttatacacacgtaaactttcaacttttcccaaacttataactttttcaggaactaaacacagccctattactagagggcgcgtgtcagccagatcagcactgcgaccggaaaccaatcctgacgcgccaccccggcgagcaggtagaggtacacagggcgctcccgcgagtccgccaccgcaaccacctcgcctcgcccagacgctgacgacttcactccactccacgccctccttcccccgatactgctctcttccattccttccaaggaatcctccccaccatcttcatctccactccctctcctctctactcctctacgcggtcgagcaatcaacccgccgccgccgccggaggggccgctctccgtcgagggctcgccatcttatatatgggccggccgcctccggctgcgctccagctgatcggccgccggaaaggtgcggcggggtttcgtttcgctcccatttggatcatgccacgcgggctcaggggctcctcctcgtgttcctcctagatctggcttggaatccatggcggtgccccgttcggctgggctgggtgcggtgggtgggtggttgtgcgtcgttcccgtgcggaaggcctcctttctgtttccgctttagagctgtgggcatgaataactgtgcactctttgcctttgtgcacacctaccttgacaaaattcctttatgttttccatccacttgcgaatttgcgaagaattatatgcttctgttaaaaacaatactactagactgaattggagtacattcttgggcgaagttttctaggggtggtgtgagagtggatgctttggttgtttcacttgctaccgtggtggtaacgctaactaaattcgtggcttttgggagagacgttgtttggtttatgagctgtgagaatggggaagcaggctgcttgctacatttatggttgcaactttttttagtagtagcatttttagaatgggaaaatctctgaccgtttaaggttagttatattagcgaaagtggattgcttgtagctttgtaatttctggacattgtctacctgtattcttgttatctagttgtgatgacctatttttgtcttctttcctttttattcttcccatgctgccaaatagtctatatcactgtgtagtgcatattcttggttcgctgttggaatgttttttcttcagttaaattttagtattcctagaataggaaatggctgttgccaattgccactatgttccagcatttacttactgctggaactgttttccatggcttggataaattatcatctggatatattaccttgtactggtgacattgcacagaatctgcaagaagatgagttcacatggattttctacaaaaggcggagatgcagggtcaaaattaccaagtacagttaccaccctaaatccaaatgcagcagaatttgtcccttcaacttttaggtcgccttttggaagtagaacagttgcggatgtaagtaaaccagattttagggggctctctggtaaaacgaaccttggtaggtcggaatcatcaaaatctaataactcggatgatgaaacacaccagttttggcatagacagcttcctgatgatattattccagacttcagtgatatggaaaaagttgaacagcaacatggagaattgtcattttctggattgtcattgaatgcaccccctttctttggcacagcagccagcaacttgtcgagagagcatcatgggttattgtctcaagcaggcaagaatcttgacctggggcacaatgatttgtattatgatgagaattcaggttcaaacagtgggaagcaaaatcatgcagataacctatgttatactaatgggaagcttgacctcctttatgatcatgacccacttgagtatttagcatcccagtttcctggtttttctgtggagagccttgctgagttgtactgtgctaatggttgcgacttcgaccttactgttgaaattctcactcagttagaggtgatctcctaatctagtccttataattaaatattaatataaggaaaataaatctgtaaaatattcttgtcttgatagccagttgtgcacccatcattcgcaacattgtggtgtcccgtattaattgctttgctgggatgcagagttgggtattataatgtagtgttctattactttgctttgactggtgctaacaacttggacatcttcactaagtgagaataatgaccaaaactagtataatgttcactcaacttccgtttgctcatctattagctgctgcattaggctgtcagtacaaagcacaaactgtatgtatgaataattcgtgctatactgctatgcattagtattagagctttgtgttgctatcttattgttttagcctcttttgacctgtaggcagatcgttttgttttaaagttattcttttttcaagtaaaaattttaaaacttctgcttggtacttatagatgggacattacattttctgtgtaacagtacaaagttgacccttaaagctagagcatatctatatttaactgtacatattttttgtcttacattttttaaaaccttttagtgcatgttgtgttctggagattttgtggcatatatatgtaggctgggattttcccattctcttaaaaaaaatgcagtacttgcacgcaaatccgaccttttcttttgattgcagatgcaagttgatgctagctcctgtcagaatctgaatctggccccaaatacaccaaacattggcacaggaaacttccctgtactacctggaacagaagaccttaattgtttgtttgaaggcaatgtaggtgcccatggaattacaaacagacacaactcttcaacaatgtctaggactggagattttgtttcagctattcaaagacttgcattgcaggatgctggccacatgaagtttaaaaatgaaagtcccaagtatgctaatggtcttttgagtattgttgcgcggaaacagtatggctgtgatacaaggtcttccttaggaaacaagttccttaaggccagtagtaatgttcactcagccccagtcagtctaaagactggtgatgccatgggtaatattctcatccagacattttgatttccgaccatgctccagttatggattgatagcctgcatttatgctactgtccagcaagcatgtgctcagaatcaaggggggaagctggtgattttgcccgcatacgcaatacatgttttgaacaagtaagcactcttaaattgcatgttcatcttgcacaatgtattcatggcatcattttgtttacttgctttgagttttcttgtgttgactacctccatttattgatcactgtcctttgatctagtggaatgtttattttggatgattggaatattttctggcaggccacgcaagcttatatgatgggaaacaaagcgttagcaaaggaactgagcatgaagggacagttgtacaacctgcaaatgaaggcagctcatgagacagctagggaagctatttatcagcaaaggtggattaactccctgataaccaattgacatgaccttaacctttcataaataaaagtatttttcaacctgccaacttactgaccactaacaaaataccaggacctggactgcacattgtattcatcttttctcctcttgcatacaagtatcttttcgcactctaaaggcgcatctagttttttttagcttcccctgcttcgttgcaggaacccattttcatctgaacaaggccaggaccgtctgatcgacttgcatgggcttcaggtgagcgaagccatccaggttgtgaaggctgagcttgccctcctgatgggtgctacaaggtcagctggagaaggcacagatcatgatctgcattggaacaggacaccacaccaagggctctcgcgaggcaaggttgccggacgcccttgaacatttcctcctggatgaaggcctccatcacacgcagccatagcctggtctgctccatgttaacctgtgctaacatcgtcttctaggtaaacaatctgggagaagaaaaggaggttagggggaaaaaagaaggtgagccctaacctgacaatgtaaaatatatctatctatacctgtatgcacaatgcacgtatactaattagctactccaagggccagagaagaacggcacgaaacatcatgtatgttgtattgtttctcgttgtacatgtcgtatgtacatatcaggtataacttgtttttagttaattaacgtggagacttacggtagtcctctcaaccaatgtttatgttcttattggaattgccacatgtgttgcgcatgaatttggggtggaggtaaactcatgattttccctttttctctggttaaggtgattattttttgatgttgaaatggaggtattatatatagggattgagactaaactgaaattatctagctaagaagtttcttactgaggtttgtggtcatgtcaggaatctggaggggacggaagtttcccattagaatctctcatcatttttactgtcaaaatgtgcgtattagagcatgctcaatgtataatgtctacttaagcaataaggtgggacccggtattagttatggtgtttgctacaatatatatggcaagagaaggcattagcctgggtcctactagtttcactcaattatatggcatgtgagagagaagaggagagagagaagagaaagtattgttattttattcttatgacattatgggtagcttatcttaaagactactatatggattactttcacaatgtataatgaccactttagagatttaagaccctctcctattgctacattgtggctgcccggtagatgtcagacctaaaaaagaaagggacaatttacagaagttagttaaaccgagtgcagtctgcagtgagctgggccttacaaagtgaaagctggtcccaacgagaacgagtgggtttgcgatctcgattgaccagtgaaatttgagcccaacgagacgtcgactaattttgccacgcttcatcctctcatcttttcgcttatgcttatcagctaaaatttaaattttcaaccttaaatatttgattttaagatttctttttcatcatagtttgtttttcggcctttgcttttaaatcgttaagaacacgtatataaaagttttattcacaaattattttttatttgcaaatgtaacgttacgcttttgcttattatcaaccaaatgatgggtctgtcaatgaattttgacaaatcctaaacgaaatccacactcgagacgatgagaaatccgatcgaaatttatcgacattctgaaccctactactcacaagccgtatggccacacacagaggtattcctatttccgcatgctacgtttgcccagggttataattcaatgaaatccaaaaatgtggacttttcggatttggttaaaaacaaaaacctcttcattttttggatcaagttttatcggtttatcaatggatttcacgaaatccgatgttaccgttcttgagtggatttagatccgctatctgaggctgataagctaattggtgaaaatattttgacttttagtttattttttagttttacaattacagtttcttgtgaagatctacagagcttgtgagagctgaagggtgaaggctccagctccccaaacagccctctctctctctctctctctctctctctctctgactcttgactctctttcgctgtgcctgtgagcaacgctgttctcctccctccggcctccggcctccgctctccgcctcgcctcgccgcccgatccgcgcgtgccttctcctcctcccccttcgttgcgtgctcggcctccgcacccaccctccgcttcgatcagccgcagcccgactcccccctgcttccccgcctactccgcgccgcccgcctttggcgctcgccgccgcggtcgcccccttccgcggctcgtcgctgggttctcgtccagcacgcgggtgccggttgcttcttcttcttcctcctcatccggtcgccgcgtcaccaggttggtgtccccgcattgcctgctgcgccgcgcgcggtagatagattgggcactgtcgaatgggttgatttttttttcgaggatgagctgctgctattgcagtttctagatcgggaagctcttagaactcgattgctttttgctaattatgtcactagagcaggaattactttgacctaattcacccccctaaaccctaaacctttggtgtactttctaagttctaaggaactagggaagcgtagtgttagcggttgcatgtgctattattatctgagttagtaaagccagatttgtttgattttgcgatttattttttagtatgtgctcaacaccaccattgcagtatctgtagaaatattttttcatcattggctcatgtcctactatctgtaattgcagggttagtgcatggcagtgacaccgcatcatcggctatatgaatttgctaagactgcccttatcaagattttcgcattcccttatgccacggtctgttatctgctcccctctttcctgatcttcgattttgttccagatcagcatgttccagatcagcgtgaatcttagaatcagaaaactgatgcttctctttgttgattgtgaaatacaataggtctgtgacctgtattgtgatggtggggttgatacagacaagtggggcgatgcacaaattggtcactacatagggattggtaggataattcacactagcctaagcctctccatggttacattgtctagtctgtcttgttaatttgacgaacatactactttctacaatagatgcctctgcatcaggtgtcaatgatgctcgtgagctgtgggagagcagaaagaaacttttcacgtctgagttcatcgagttagatccttctgctgtacaacctccatccctcctttcatacttgcaactaaatacactaacattctagcatgagtagtttatagctgacacttttagtggtttatacaacaggatgactttgaagctcaaatgcaagaaaagggcatccaagcagatatagtttgttgtatgcagcatttgcaggcaagttgtctgttctctgttgctgtaatatggtgtttacttatgagctttgctaatcttcactgttaatctatattgaaagacagttatgtttcgagagtgaggaacatgctcaaaagcttctgaataatgtatcatctttactcaaacctggaggctattttgttggcataattcctgattcatctacaatatggtatgggcaactcatgagaattctgtttttttctgtctagcgttatagaccaaggtcttcaaggctgcatacaggcaatgggtgcctaatcttgtagcacataaatagcataagtagtcctttatgctgcataagtattacaaggggcataacacttaagttttttagaaccttgtttatgtcttaatttctttcttcttgcgattttttaaaaaaaataatatgattttaatggaaaatcgcaaaaatataggtcggttaggcgaaatcgcaagtttagcaccctgtcgaacaaccgtggtttgacaggggaacaaccgtggttcgacaggggaacctatcgaacaactgtagtagtttgacaggatagttggtccaagaaaaaaaaaataagtacttgctacagtatccggtaggaacatatcgaacatgcaaagttcgataggggacatatcgagcaggcaatgttcgataggggcgcggctacagtgctacagtgtttttttcttttttttaaaaaaatattttatcacatgtcgaactgtcccagttcgataggtaccctgtcgaactacggttgtttgataggtactctatcgaaccacagatgttcgacaggttgctaaacttgcgatttcgtctaattggcatatatttttgcgattttccattaaaattgtattatttccaaaaaaaaaatctcttcttgcattatagattatataagaaatagccaatggcataaattttgcagttgctaagatagaaggctagaattattaccaagaagaataagatcgatacctcaattgagttagccgtaactgttggatgtttctaacttatatgatatttctaaattgtaggacaaaatatcaaaagaatgtcgaggcttcacataataagggtctgaagactgttccaaatagcattcgctcagagaactatgtcatcacctttgaagttgaggaagaaaagtatgactcgagcttgtgtattttaaatatatataaaaattcaggtttgttatggtgagggatcatatgcaatatggtgcaggtttcctttctttggaaaaaagtaccaactcaaatttgcaaatgaatcaatgttcgagaatcactgcctggtccactttcccagctttatgaggtaatattttccttattagtcttccaacaattgttgtacagccttatttcgtaaggtatcacattgttagattatgttgaaacagattagcaagggaggcaggacttgaatatgtagagatccagaatttaaccgagttttacgatgataacaggtgccaatatcctattgcaagttctatattattgtctttgcatcattttgttgtttatttagagtaaccattcttcggtttttttatttgcgatgcttaggttaccctgtttaaagctgatagttacttttttgtgtgtgtgttctcaccgactccagaactcagtttgctccattgcttggtggttatggttccagtttggtggatccgcgtggaaagcttgtcgctcgttcgtttgatattttaggtgatgtagccttttcccttcaggattcactgaaggtcccagtttactcattgcctgatataatttctgcaggcttgtattcaacttttgttttccagaagcctgacccagatgcaatgccaccaattgtaacacccgaattgcatgatcctgagaatgatcaagaagaggtctgctctgcatttagcaggtgttgatatttactatcacattttactgatatttttttgttaactgtgagtgaaatatcaggaatggctctggacgcagcaggcatcaatggacgatggaagggtctcacgtactgatatacttcctcctgcggataatgagaaaggcatccttggtcctggacctgcagatatgaggctttaagttcactgaacaactggatataggctcactgctggagttggagcaacgatgctcctgcaaagctgcaattggtggtttatggatgcatacatatgcatgatgctcacgtagtttctaaatttatttaggctctacctgtaaaaagaaaacctttcagttattcttgagaagatagaattagcaccaatgtcatatgtcacggtagaagatattgatagagtagttcactaattttgtagtggatcctttaaatattactccctttgtcctataatatagcaacctaatactagatgagacattgaaatgttacaatgaatctagataacctcctgtccagattcggtgtatcatgaaatgtccaatccggtattagattattatattatgggatggagggagtacatcattacccgtttacgactgactcagtaccgactgtcttttcttttgcatgatgtggtaacaaaccatcgcgaatcacttccgtctcacacgtctacgctgcatttctttccccctcatgaactctcgtatccattccatatgcatgtgccgagagaaagggagaaaagaaaagataaaaagagcggtgtctagaacgcgacgacgaactcgatgcaaagcaaaagtttttttgttgggcatcactcgtgcctgccgcgatgcgcttccggacaggcgacatctgcctgcggttttgtgccgtgccgcgcgctttcgcgaccgggtgtggaccaggagggcacgcagacgcaggcaggatggaccgaatcgcgcgtgcaaagcgggggacgcggttgatcgagttggtgttggaaggttggtggtggtgttgccgctggccactgcagcactgctggatgattgttgatcgcccacggcggccggggacggaggcacacggaccgggaccggtggcccgctctcacctgcacggcaccacgactgccttccttccccgctcaggagagcaccaaacctcaaaaaataaaattttcacctgcttcaagagtagtaccaatatttgtttttatatactccctctgttccataaaaaccaacctagaactagatatgacatatcttattgcaacaaatctagacatactagaatatgtcatatccagttctagatttacttttttaaatgaaaaacagcacaggtgtaccttttcattgaatagagtaggagaaaatacaacccctaaaggtaaaccgcttgaaacactggccaagctagaaaaggtaaaactgaaattcatatttttatagagtttgtttgaattgttgataactggataacagtcctgatttggagtttggacgggcacaaacacaaatcgctactcaccgtctcaccgagttcacagttccgggaaactgttactccgagacccacttcgccgcgaagtaaccggacccttatcctatggatatagttggggcccccttccccggcccaccaccgcacgcaacgcatcggaccacttgacttcgcgcagcggcagcggcaaaccgcttcccggaaaagaaaaaataaaaaagaaaaaaaagagaagagccgcgtctccctcccaccgaaatccctcctcctcctcctcctcgtcccccattcgccgcagggctcggctccacacgaacgcgacgcggcggccgccaccgattccatccggaggaaggagccgcgccgcctccttcctatatccctcctcctctcccgtcctaaaccctagccgcgaccgcgagttcggggtcctaatccggatcgactccgcctccccgagtcgctcggacgcgttcttcttccgggtaatcttaatctcctactattccgcgtttgagcctttacgctctctttctttttcttgtgtgtgcgtgatttggcggtgattctcgaggtaattcgttgcttccgcacgttggttttctcggtcgatttattatcttgtggttttttttggggggttgatttggtgtaggggttcaatgatccattattactacttgtgctgtatgtagggctgggaaaattagggtttgttttcccgtttgtaacggctaattattatctcggtgaaaaatcgacggcctcgctgtaatattaaggctcgaaatctatctgtgtggtaccaggtttgactttgtgctgcccaagattgcatctccagcggaagaatcagagggattaaattaacgctgtctggctgcgccattaataaccttgggtggtggtggtggtggtggtggtggtggtgctccactggagtggaggctgtgagcaagctagtggagtgggggcgtttcttaggcaggtgctatggcgacagcaacaatggcaaccgcagctggcgcggctgcgcttctgtactacacgctgaaccgccggcttcaggtggagaagctgaatcaggaaggcgattgcggcaatgaaagagatgccgcgacgaggggggccctcagtaccaccagcaggagcagggtgtcaaggagggatgttcgtgcccctgccacatggctggagacaatttccactctgtcggagacactgcggttcacatactcagagacccttgggaagtggcccatcggtgacctcgcttttgggattagcttcctcctcaagaggcaggttggtaaccattcctttgttgctaataaacatgcatctttgtaatttgtactacttaataattgtaagctaatagggtctgcttccatgatttatcttgcaaatattgtagtgattataatatggtgcagtgtgcatttatattagctttgttagcataatggggctcttcaattttgttaaactaaaagtaaaataattttggaaacactttatcctagcctataaattgatttgacgatctgaacagctcgcagatcatttacctcatattattcaatctgtattattggctttttgtcttgaacatctgatataagtaaagggagaaggtgctccatacaaccctgcaaaattttacccctctccggaacaacaatttctggtagaagtacatgaaggatttttgtagtatggataaaaaaaaattatggtatcattgaaagaagccctttatgtatatatcatttcatgggaacatatcctgtacacaagccttctcgtgtaaacactgtgcccaccaactaacaaattttataaaaaaatctagaaaaaaatgtacaagtacttccaatagtattacacttatatgcaaagtcttaacctcaaatcaatatattttagccgtgacagaaaagataaaaactcttgacagttttgagagtataaatctgttagaaatttgtctctttttttttgctcactatatataatgaatttgaaaatgagactttacagatagatgtaatactactaaaagtacatatacatttttttttttgaatttttggtgacatgttttagtatatatgagaagacttgtgtgcataggatatgttccctcatttcactccattaaatttacccccattccttttgtatgttaccatccacaatgctgcccatcctaaatacatacaactgaaagcatattttttacagcataaaactaatctgtagtgcacaccggcacacacacacttcagcagagtttctgatccactggttgtgacatgtgttccaggggaatgtacctgtagcaagcatatatgctggagatgatagtgtggagctcaatggagctccagtaattgctgacttaaagcatcatttaaatttgttgacactatgttggcatttctccaagaagccgttcccgttgtttttggaggcgactggctactcttcggaggatgttcttatgcaagagcctaaagcaggagtgagtgaattttacctgtgtttctttaggggtatctcttctcttgctgattctgcattcctgtaatatttcacaaggaaaaaagtgcctactttgcattgatctggtgtttttcttgggatccttgcagattttgaagccagctttcaccattatacttgatagagacaagcaatgtatacttctattaattaggggaacccacagcatcagggacacactaacagcagccactggtgctgtggttccattccaccatactattgtacaggaaggtggtgttagcgatttagttttagggtacgcgcactttgggatggttgcagcagctagatggattgcaaagcttgcagccccttgtcttgctcaggcattgcatactcatccagattataaaataaaggtacagcgctttgcactgtttttgtgctctcctacccactgttgtaatagtgctgaacgtcgtatcagcacaaccatttagagacggatgcacttattctgtattgtgttcatggtaaatttgtatagattgttggacattcacttggtggtggtacagcagctctgttgacatatgtcctgagggaacagcaggagtttgcatctactacttgtgtctcctttgctccaggtatgtgtgctatgatgtttttctgagagttatcttgctgcacactgaacaatgaaaattgaaaatactgctttgtcacttttccttattccactggccatctcctttgttaacataaacctgcatctcatgcagtaaacattataggataacggactagatatctctttgacgaataagttcttttttctttgggtatttgaaacgtgcatcttaatattttggggcagaaaagtaaacatgtttttttcctcacgtttgagtacaatggttccaatccttatctttttagatcaacttatggtgtagatagtgatttaatgatcttaagattgaaactgctattgtttggagctatcataaacataattgttgtctacctagaatctcatataaacttaactcttcttccccaattctcattggaagcttacttttgattctcctagaagttaggcctgtcgaatctaatagagccatgtgcatatttgcatcttaagaacatggagttttttccactgcaaactccgaacaaaatgttgatggactaccatatctccaatacagaagttgcaatattgggattgatttattgttttgttgatgctctattttgcagctgcttgtatgacatgggatctggcagaatcaggagtgcattttatcactacagtcatcaatggagctgatctggtgccaaccttttcagctgcatcagtagacgatcttcgttcagaggttttttttgcattctattgatttattctctgcagtggaacatagtattacagctagtcttatcagcttatcaactgtcaacaggattgttgtaattgatatgagttcttattcttgttgaagtagatataagatataatagtcatagttaagttgcataaaaaatatctttttttttcatgtctgtagggatgtttgtatatcgtcatagctcacaataatgccatttttgtaataaaataactcctgcttttttcaaaatataaaatagaagttattgcatacaggttactgcatctgcctggttaaacgatctgcgccaccaaatagagcaaaccagaattctgagcactttctatcgatctgcgtcagccttgggatcaagacttccttcaatagcaaatgccaaagcaagagtagctggtgctggtgctatcctaagacctgtatctaccgggacacaggttgcctccatagctttgttctcgctaagttcaaatacatttatgttatccttgactaataatgttggctatgtatccttatggtcaggttgtaatgaggagagctcgtagtgtagcacaagcagcttggacaagaccagcacttcagctatcctcatggacatgtattggcccaaggaggcgaactaatactgtatccacttcaacagtaacatcagaagaaataagagcaacaacaaatgatggctctgagtccacttctctgttgactgaaaccacagagatagttaaaactgaaaccatgcagtttgcttcatcagaagaggttcagagttcgagtgaggtgtcagatgctgttggaatgatggatgagaaggtagatagtgacggtgaggacatcattgatcaccatgtggatgaggacaggatgactgacgtagagctgtggcagcaacttgaaaatgagttgtaccgaaggagtgaagatgacgaaatagtggaggatatgactgaaagtgctattactgaagaggtgggtggcacagctgaagatgtgctcagtgagaccaatgacaaggaggtacatagattttatcctccaggaaaaatcatgcatatattaacttccaccatagaggaaacagtcagtgccgaagagtcgagcgtgcctcatgaagatgacacgaccggtgattcggacaccagaataggcatcttcttgaccccaaggtcattatatggcaaactgaggctttcaaaaatgatgattaacgatcattacatgcctatatatagaagaaatattgagcagttgatcgctgagcttgagaaggattcgtcattcccagtcagtgattgtcttgacagtgaagttccctagtttgacacatacatatatgtagttccagctgttgtaaacgctgatgcaatagaatgatagtttcgttaagtgtatctaacatcctctggaataattacagaattctcaggtccctaatcacaaggcaccacaaacgttgccctatttcttacaaactcaaggaccatttctgttacgcaaagaaatttctacctttttttcgtttagaggatgtgaaattatttaagggattagctatacaactttgaacggaaaatttccctaaaatctattaaatgtaattatagtataattatgttgtaattatattaacttagatataattacaaatgtaattcaagtgcaagtcgtatgtaacttccaagtgtaagtagcatacaattttagtttttcccgtgcccatacaatcttagtcgtatgtaactttaagtgtatcgtaggcacggatctgcagcacaaaatctgtcaacatcccatttgcagaacagattatttcacgcaaacttgcaatgttgactaaaaacatcagctaaagaatagaaatggactaaaacatcagctaaagaaaagaaatggccgcatttctgctgagaaatttatgtacttcctctgtttcatattataagactttttagtattgtccacattcatatatatgttaatgaatctcgacatatatatatatatatatattaattggtgctatatggagtatgggctccaagattcaaattgagtatatacccaatttgaatgagtatgaaatttttttaaatgtttagatatgaacattaacttctttactaataagttcaaacaagtttgaactgagtttgaaccttttttttttgttagattttggttctagatatataacattcaaacatataattcgttaggtatgtaataatgaattgtgaaataaagttgagtttaagttgttttcttgttaggtatatgtatgaatcaaattcatatacctaggtatatactcacaatttgaaaatttttaaaaatttgagagaatttgtgtgttttataccttggagcccgggcaccatggagttccatatgggtatcctatgtaggtatatatatatatatatatatatatatatatgtgtgtctagattcattaacatctataaaaaaaaatatgaacaatgctagaaagtcttataatatgaaccattgggagtatttctactgaaaaattcatccggtaggatgttgtatgcagtacgtacaacagtgatgtcatcactcatgatttcatcttcttggatggtcccgtcgtcccttgcttctcaatgccaacctttctacgaacaccggaaggcaggctctctactttggaagaactcgttgcacgatcccttcctttttggctcatgaattctctgaatgatggtatcttggggagctccatattttcagataaaaccgccacctttgcaatctcgtcagaatgctccgtcgttacaaactcctccgtgttgttcttcagaggtatgtccttagcttcgttgctagtagcttctccagggattttacagattacatcaggagatgctggaggagactctgggacgatggaaggggagcttgccgcagcaccatgatctgtgatttggtcagcaagggcgtggaggcggtcctgtatctggtcgaggctcgaagacgaaagccaccgaactgtggcggctatctgcgagttgtagaacgtcttgcccactttctcgtacttcttgaagcactctacctcaaggtgtgctgcagaaggctcttcatcaaacctgaaagcacccattcattgaaatcattagcaatcatatacacttcacagtgcaagagaagcaccacaaatctgaaaacaaaaatataatggatccatcctgttatagctttgatgtaattccgtgcatttctgggctgaaggcataatttactcattagttattgagcaaggcttatatacacaagtcagtggaacaaaggcttacatacatgcttaaataagccaaatgctaatatcatggattattaggctaaatgctaatacaaatgcactattggatcaaaggtgtaatactcgtgttttgaggcccaagtataacagatgaattcaggaacaaaagctaatactgacgtgtttttgggtcaaaggcaaatacatgtgtaaatgggccaacggttaatactcataaatttattgggtcaaaggcttttactcatgatttattgggctgaaggcttatacagatgagtaaataggccaaaggtgaatactcatgagttatcaggccgaattcatcatacataaatgcgtacacatgccgaaggcataatactcatgaatttttgggttgaagatttatagatacataaatggcccaaaggcatacatgagctatttggccttaggctaatactcatacatattggaacaaaggatagtactcaagactttttggctcttaagtaatactcgtgaatttttgagttggaggcatattttttagattgaaagctaaaactaatcttttttttatgctgaaagctaacacacttatttttttaggtcgaaggggaaaattttgggtcaaagtttaataccctgaagttttgcacaggagggtaatactcatatttagagaacacattaatattagcctttggccgaataacacatgaccattagtctttgcctgaaatttcacaagtattaagcttggacccatgattgtttgccttcggtcctaattacattactattaaactttggcccagactttcatgagtgtttattaaccatcgacgtaaaaatacgtgagttgcctttcaccaaaaatttcatgagaattgacctttggctcaaaatttcatgagtatcgccctttggtccaaaatttcatgagtattaaccttgggcccaaaaacataaaaatgttagcccaaaattccaatagtgctaacctaggcacaaaacgctaataacctctagctaaaaacacattagttagccttttgctcccaaaacacatcaccattagccttcaaccaaaatttatgagttaatacctttgggaacaaaaacacgtgattatttgtctttcatccccaaaacacacaagtataaagcctttggtccaaaatttcatgatattaacctttacgcaaatgaaacacatgaatgttgccttcggtttgaaaaaagctacagaaacatacaagcattgaaattcggtccaaaaacatatgattgttagcttttagtacaaattttctgagtaatatcctttggcccaaaattttgtgagtattaatagtgtgccagaaacgcatgaatgttagtcactggcctaaaattccatgagtgctaaccttgggcataaaaacgcattagttttagccattgaccaaataacacatgaacattactaccttcgtgccaaaataaattcacttttgtacatgaatctggatataacctatgtccaaattcatgtacaaaagtgaacttaatttggaccagagggagtatcggctaatatacgtgtaaatgggctaaagcttattcatccgtaattaggccgaaggccaataattatacatttttgcgcccaaggttaacactcatggaattttggcaacaggctaaacatgttcttgggcccaagattaatattactaaaaattttggccaaaggttaatactactgaaatcttgggccaaagctaacattcatgtctttataaggcattaagtcgtgcgtttttgggccaaatgttaatacttaacaaatcttcggccaaaggcaaacattcatgtattttcaagacaggctaataatcatgcatttttgggtcattaatttttgggccgaaggctaatacttgcatgtttataggtgaaggctagcaagcatttttgtgcccaaggttaatactcatgggaccgaaggctaatatgtgcgtgtttttgggccgatggaaaacaatcacatttttgggccaacagaaggctaatacccacaaattttggtcaaaggctaatgttcatgtgttctagggcgaaaggctaattcatgtgttatttggccaaaggctaacactagatgtgttatttggtcaaaggctaatactaaaacgcttttgggcccaaggttagcattcatggaattttgggccaaaagctaactcatgaaattatggggtgaagcttaggagattttgggccaaaaactaacattcatgtatttttgggccgaagtagggctgtcaactagtcgagctcgatacaagcttgagctgagctcgaacatagcctataaaatgttcgagctttcaaacaggctcggctcgagctcgactactgagctcgatttttcagtaaaacaatatatatttcaaggataatcttttaaaaaataatttctagttcaccatgtaaatggaagaggaaaaataataaaataaatatatgatgccaatacttgacatacaaataacatatataacctcctaatttattaaataacaacaaaaattatatattattaagctcgttggaagctcgagctcggctcgacagagctcgcgagctttgggagaggctcgggctcggctcgtctggagctcgagccgtgctcgaatcgagcctaagacgagtcgagctcgagcagctcgcgagcctcgagccctttttgacagccctaggccgaaggctaatactcatgtatttttagactaaaggactccctttgtttcatattataagttgctttgacttttttaagtcatgactaagtttatagaaaaatagagcaacacttaaagcaccaaaaaaattagcaatatttttaacacaacaaaaaaatatttctaacattgaacatattttgatttttttttgttgtgttaaaaatattgctatatttttttataaacttggtcaaatctaaagaagtttggcttagaaaaaaagtcaaaacgacctataatatgtaaggccaaatattaatactcatgaaattttgaaccaaagggtaatactcatgaaattttagaccgaatgctatacccaaggttaaggctcccttaggaacacaataaagtcaaaacacggtaataggaaaaacataagaatggagttgcttggcttctccaatcctatgggaagaaaaacatagggaaaacttcaaaacatgtgtttgcatacaagataggaaaaaatacaagattgttattttagatgaacaacgtgagtgccctgctttttaagaattttttttaaaagaacacaggattgtataggattgtcattccataggtatttcaaagggaaagaaatgattaaatcctttgtaccaaaggcctcttcatggttttttttttctctataggattggaatcctatgaaattcctgtgtatttcctataaaccaaaggggcctaatacttatgaaattatcggccaaaaaatgagtgaagaaacttgaaagaaactgacagtacaaatcatgtattgacaataaatcattgtagaataaaacaaactcacggtagattcccaagtcgcaactttgcttgtccaaggccattcaacaatcgcttttggcttgcatctcttagtgtctgagatatgctcttcttgtcaacaagcttcccaccctatttatatcactagttgaagtttatgactagctgagcaacgtgatagattctttcaaaaatatgtcttgtcaaatttataagcagttattaactcattgttgttgcgaaagaaacaagaatcacaaaaaggcaaactatcacctgctgcttggtctgacctttagcttgataataagcattttcagcacgctccaatgcttcaaattttgcatctagccctgcttttgatgggagctttgaaatggcagtattgctcaccacctccttcccatctgccattaccccacagacattagtgcacagtgaccatatacgcacaaagaggggaaaaggtgagctctaccatcggaatcagatatatcttcaactgatatgcttgcatcatcttcacgattccaaaattctgtctccatgtgttttggattagccaacgagctgccaagcaaatgaattattagtacagcataatccagaagtaaattactccacttagtctgtcttgagtctactaaatgctatgtgccactgtccgatgagaaaaagttatagatgaacaagtaggggtaccaacgccgatcgaaaaaggtagattttgttgcccaaaattcaactacttcacataagatttgttatcagttctatcttgatggatatacccattatattattttgcatgaaaagagaggtcaaaaaaatgtttatgcaatgtgcgttctctctaaaaggcaacatcatgagtacatgaaggaaaattccagttcacaactaacataccttttgaagactggggatatcttgttatagcgacaggtgggcacacgacgaagttcctccaaacgtgaggacactagatttgggtgtttgcaagcatcacatgagcgttggcataaagttggttgtacctactcattttacaggttagcatgcaatagtggaagtaaaaaactagaaaatactacctccgttttttaatagatgacgccgttgactttttctcacatgtttgaccattcgtcttattcaaaaaatttacgtaattataatttattttgttatgagttgttttattactcatagtacttttaagtgtgatttatatcttatacatttgcataaaatttttgaataagacgaatggtcaaacatgtgagaaaaagtcaacggcgtcatctattaaaaaacggagggagtattagtaatatattcaggattaatgtcataccttctccccaaagctctcaatgatcatttttcgtcggcaggtagaattttcgcagtaatcaattatctgcatcaagagatgcaagtaaaaaaaaacatgaaatctactgcatgatatagtagaccaattccatgttaggtagcaagagtgcaccaacctgactaaagtcggctaaggccttctctgaaagttcagttgaagaggacgataactctgactttttgttcttggtgtttctcaaaataaattcctgtaagagtaagaccatagaagcctcagttttcatgttcaatgacaatgtacaatctggcacctaattaccattttctttcggtcatctaatccataatatagaacacttttggaaggctgttggtcacggccagctcgtcctgactcctggtagaaggcttccatggacttaggcaagttatagtgacacacaatacggacatcttgtctatcaataccctgaaaaaaaaataaaacccaatgtattagcaaagcacttcttcagaaagactgacaaaaaaaaaacaattagtataacataccattctgtggaaggagaatcaacatatcaatgcacacgaagtcccgtattgaaagaggcgatgtagagggaaacagagtaagagcctcatttggaaaaaatatataatataagtacagaagccaaaatcaatcataaacaagtactacaggttggaaggtaataaggtaacagtactcagatactacatgtgtgctggaacttgtagacatggaatcagcatgtcacataacagaaatgatatttcaaatgatgtggagggaaactatacccaaatgcaacagtggcaacaacaacttgagttctcgaggaaagccaatcatcaagaacagaactccgcaccttgctatttaggccagcatgataagctgataaggagaacacaggactgccatgaaaattctcaattcaacagtcctaataggtcttaagacttagaaattgtgactttaaattaacgtaccagcagaggagataccctgctgtgacaaatgcatagttagatcatcacaaaccgcacgttcaagacagtacacaattgagcaaacatttccactggacttcagtaaatttgatatgtcagaataaacgtcatcaaggagatccttgtagcgaactgcaaaaagtagtttatattataatatgtaattaagagagaattgaacatagagacaaaatataggcatagcagtaaacaattgacaggaaccatatgttctgggagatacataactgaaaagtactaaataatcatgagggaagggaacatcagtaatactgtcccgcgtccacaatagatgatggaaagcatggaaatgtaaaaacagaagaatagtcaacataccaagaaaacaaatgccccagtctaaagataaaaggtcggtgcactcaagctaagtgttcaagaacccataagttggaaaacttaccttcatagaatatattaggccgattaaatgatgccctaagaattaatggatttctcaagcacagtgacgatatcacatctttctggactctggtgtaaagaaaaagagaatgaagtgtgaatagaaaacactagattaaaatatcaagagaagtgatggtggcaggtagtgactattaaggggatagtgtcttactttggaactgcggttgcagttaaagctaatataggtatgtctgggaactggttcctcagtgatgaaagcttgcggtaactaggtctgtatttcattaaaatgagtagaacaatttacaaattctgtaacaaggaggaatgcttcaacccattttttaaccaatgaatctgcaaacgggcaacagacgaaagcaagtagccaccaccaaacactaaaaataaatgcatacctgaaatcatggccccaagttgaaatgcaatgagcctgtagagacaaaaaatgcaaaataagccacagatgctcttcatcacagataaaagaagaacagggtgttactagaggagtaaagacactacttaatttatacctcatcaatagcaacaagaccaaggagacctctattgtagagctttgttagctttgccttgaacccagatgttgcaaccaactcaggagtaacatatagcaattttagagaaggattaccagaatcaaggtcttcatgtatctgggagaaaggcatgtatgacaaattacaaagtcaagaggaagagtgttatcataccgaactaaccatgtgaccaggtaaactcagccagctatgaatttatagagtcaaaatttcagttgaaactaaagagtcgaaaattttcataaataattgataatatcctaggtaaaccttaatctgcacaatgtggaaaccttaccttttgtttattgtgcgatgtttgtgttgacgagagaaactcagctggaatacctttgcttttcaagctggcaacctgattctcctgtaattttcataaaccatgatgatccatagtattcaggaacaacaataaaaagataccaacagataacacagcttaccattagtgctaagcagcagatttttcaaccatatcaagaagctattagtatatgcacatttgtcaagtactatttttttctggaaataactgaagtttggtggatcaattcacctatcaagggtgagataacaagaacaatgcctgacttcactagagcaggaatctgatagcacattgattttccacctccagttggcatcaaacaaaagcaatcccttcctagaaataaattgcttgttacattaatagaatccatggtgcacaaaagtttcagacagcatacttcagtgatcagcaacaaaagttcttttgaccagaaatattcagcaaaactaaaaagaaataaagactacaagcacaaacacagacgggaagagcacctgaaagaacagcttctatagcctctagttgctttcctcgaaagcctgaatatccgaaatgttgcttcaagacgttctccagctcctgaggagctttctttccatgcccagatcccgaggcccccgatgcaccttttatgggaagttgtctcttcatttttcagctgaaccattgaaatcatcagaagaagaagagcatgtcatagccattatagtgtcacaacgatcacgatacaaacaatatgctaaatccgcagctaatcgatactatagatttggtccaacacaagtgatactctgattcgagtggtcggtaaacaaataaatcatgaaaaaatcgcaacgggtgatcacacccacatctcccgatatatgtaccaacgcaggagtcaggacccgttagacagagaaatcgcgcaagcacagccaaaccaaccgagatgcgtatcaaccccatcaccctcttagctttgctcgcagccagtcaaatcggaacccagcggcgcgccactacggtgggaggcatcgaggcgggccaccccggcggcgtgattgggagggagtccgtagggttcggggagtggcggtggagacatcgagatcgaggcgtacctacgttaggtcagcggcgacggcgacggcgatggcgccgctgcggtggcgcacgcgccggcagcagcagcagagggcaccggaggcgacggcaggaaggcgagcgaagtcggcgagccggagagagacgacgaggcttgcgaggcacacacttccctttcctatgggccacggcccacgtagtgccaggccgttcccaccaagtgggtccaacaaaaagcaacgggagttgggttggatccccatatgggctttataaatgggccgaaacttgccgtctctgctgcatcgatgggaataagttcactttagatccctcaatggagagaatttagagacatttgatttaccaattcgatcaactttccaacatcgcttgtaagttggcgttaacttaagtagaaaactatggaattctttacccctgatttaatttcgaagtgaaacttattacatcaaatcggtacttagttagctaagctactgttgatgatgagtaattaagcagttcttgttgcattaactataatcatctccataacccaccgacacgggcgcattgatgcagcaattacatctgaattgatgcaattaggtgctctaagtgatcagatcagatcagatcttcagaacatatatatgatccaaagcacaggcatctgatctttgcaatactggaacacagctgcaactgatggatgagctatatcccacctttattcgcctaacgagagacacgtctcaccaaacgctagctaactccgatccggcgagagatcagagcaacgagtagtgactgctacgccaaaaccgatcgatcggcgtccaggaagaattggtgacgctgctcatcaccagctaccgcacctaaccatcgcctcatgatatgtactactggagaagagtatgggtatagatagtgtgtgttagtcctagctaacagccagcggccaatctagctgattattactccctctttgtaaatataagtatacgaagcgtgtgaaatttattcataaatataaatgatttttttgtaaaaccaattcatctggattcaaatcctagacttgacacagttgctcacattgatcgctaataatctttaagtgaaaagtgtacttcgtcaatcttaaaatatatcggtctataatataaatatttcataaacgacttgttttattaatcatttctctctctttttttatcttaccaccctcctactattgaccatattttctttaacgaggaataccaaagtattttattctaaatcttaatatttgctaaacaactcgcacatacttgtattcgtggacggaagtagtagctagcataaggggagaaaaagaagaatatatatgtcttttgcatcagctttgtggaaaagtggagtataacaagaacaggatgactgggttgcccattgacaaggcaaagagaaagaaaaggcccgactaaagttcctgcctttcgattttctcttccacactacaatatttttatggagaaaaaggaggccggctgaacatcttggttaatttatatttggaaaaaaaacataacctaaaatggctcactattatcgcatgatttcataaggaaattgcagaaaaactccctctgtaaaattctaaattatgtggattctggactcctgtgggtaagtagttaaacatcctccgaggagataaaatacgcaccgtccgatctaaatcctacggcacgaagcagcccacgtgacgtgatggcagtgtggtaattctcatcatcttcttcccctcaaccgcaccgcaaaaagcccacatctttctcgcttccacttcactcgaaaggctccctccacttataaaccccaccaccaactcctccaatggcggaaatccccgaccctgcgccccttgcctccgccccaatccgcggaatccgagctcgccgcgtcctgccctaccgatcgatctgagcctcgccgcgcgccgtgccctagatcgggagatctcgcctccggcatcggggacagcgcaatggtggagacgtccggcggcggcgggaggctccacccccacggccagcggcggagcgtggccgcgttcctcgcggccaacaagacgctgctcgccgccgcgtgggtcatcgggttcacgctggtgttcctgtggcagagcgccaaggtatcggtcggcggcggcggcgggggcggcgggttcctcaggctgcggtcggcgccgccgccgccgccgtcgcgcccggcgccgctgctgcgccccaaggcgtacgaactgacggattttggcggcgtcggggacgggcgggcggtgaacaccgaggcgttcgagcgcgccgtcaaggccatcgcggcgctcgcggagcgtggcggagggcagctcaatgtgcctcccggccgatggctcaccgcgccgttcaacctgaccagccacatgacgctatttcttgccgagggctcagaaatccttggcattccggtgagatacctcataccttccccgcaaaaaaaaaaaaaaaaaggaaaaagaaagatacctcgtacctcacgccgtagaatagaactggagtgatgctgttaattttgcaatgcattcatagtcttttcgtgaagttcaaaaattagttcttttgagtggttttgatcgggtaagcatatagctgaataaaagtgagtttgcttattggcttcatggctaaagaaatcaatggtatgaatggataatttgtttctgtcttatgtgttgctgagactgaagtctcaagtgatatcaatgttattgaaatttggaaaagggtggaaattggatgatctagttttcacctatctgctaattctgtcctggttgtataatttatctaattaaggtctttgaaaacatgctgtgatatctcagatgcatgcgcagagctgcatatattgattgacaggtgtaccgattccttatgtttccatggcaggacgagaggtattggccgctcatgcctgcattgccgtcttatgggtatggcagggagaggaaaggacctcgctttggaagtctcattcatggacaaaatttgaaagatgtagtcattacaggtttgaagtgttttctgaataaactacaccacctaatgatgtagtcgtagaattgtgaattaagcaacatcagtgacagaagtgcatggtgtgaattttaagcaatttaatgatggaaacttctcctacttggcagtatgttatggtgacataaaacaactgtttaacccatttttatcccctggtctgaatgaactttctttcagtatgcataatcgcactacctgctcatgtaaaaaataaataaaaagttaaaacactcttattctcttgttgttgtgttccttactgatactttgctaagtataatatgcaagtccactgtaatggaaacacttgtactatagagattccagtatgcatttggttctcatccttgcactaatagagcatttggtgtttctgtatcacttcttcactggatgatagttatttaactttcacatgctccctattttttctctgttgaataggacacaacggtagcataaatggacagggtgaagtttggtggatgaagcatcgcagaaggatactgaataatacaagacctcctcttttgcagctgatgtggtccaaggacattattgttgcaaatataacattgaagaattcacctttctggcacttccacccatatgattgcacgaatataactgtttctaatgttactatcttagctcctatttctagtgctccaaacacagatggcatagatccaggtaatcatacgaacctttcttcagtaatttccaatcatcctgcataatttcagcttcttgttataccatctaggtttgtttctgttatcaatgacagtcattttttttatttggtgatgctgacatatagctgtatgcagattcttgtcaggatgtgcttattgagaattgctacatttcagttggtgatgatgccatagcggtaaagagtgggtgggatcaatatgggattgcatatgggcgcccatctcgtaacattgtgatacgcaatgtaatggctcgttcattggtcaggtaacagttgagtcatttttggctgcattgcttcatctaaaatatttctttgcatatctttttcaaatcctgctcaagataaaatggtatgagaaagaaactattaaattaggattaacttttaagttcttttgaattgaatatagagtattacaggtaaggtttacaacagttgtcttggtgtgtgcagtgctggaatttcaattggcagtgagatgtctggtgggattgcaaatgttacagtggaggatgtccgcatttgggagtcacggcgaggtttgagaataaagactgccataggaagagggggctacatccgcgatatctcctatcgcaacataaccttcgacaatgtccgtgctggtattgtgataaaggttgactacaatgagcacgctgatgatgggtatgaccgggatgcctttccagacatcacaaacatatcattcaaggaaatacatgggcgaggtgtccgggtgccagtccgtgctcatggcagcagtgacattcccatcaaggacatcagctttcaggacatgtctatcggcatcagctacaagaagaaacatattttccagtgttccttcattgaggggcgtgtcatcgggtcagtgtttccaaaaccatgcgagaatttggatctctacaatgagcaagggcagcttgttaagcgtgcagcaatggtaaacagcacggaagttgattatgacatatgatgatataggtggctaaggctaacagcagaacatgggtggcattcccatcctcatttttgttcttttagtctttctgtgttttttgagattagaactgtatatacataggagattcacctcttcataggtttgaatgcagtggctaattgtatctctcatttcatttgtccaccagcattttgttcttgctgccaaacatgtaatacaaccttgcaatcttagaaatacacttggccattcaccatccctgcccaactgaaagtaaaagatgttaattattgttttatcggtgcttgatgatgtcaattgtcagagtggtatgaattttggcaaaagtttttgtacctttgctctctttttcttttttcactttcacctccctcagacctggactcttggtggagctagacggctggaaagtaaagtgtgtttaagttacatttttattttatttttatttactaccatactttataaatttatctttcaagtttcctttttacagtggaagctgcatggttacatgacaaggagttcaggagtgaaagctgtgaacaagagatcaatcatgaagcaaggttggacagagcttgaggaagtggtgaactttcttttctgaggacagggaaccaaatctttcctgctctcagcctgagccaagtgtaagtcacccataccatcattctatctacttatggccactcttgttcccaattcgttctgttcttaacaagtactacacatctttatcaatttgtgaaagaggagcaccatggatagatattactagatgtttttgtggttctgagagattgataggtattgtgtagcaagtaactgtcagagtcagggattcagatagctggggatatgccaatctttgtagtacaaacagataaggtccttcatggctatcgctgttattagatcccacacatcaacaaccacataaatttacaaacatgtgctcttattcttattctcttatcactgttgccgtgctgatcattgtactgccactgctggtttctgcagcctgtagacttgtcaacggaatcaactagaagttcagaaccaatgcttgaaaactaaaaagtgagttcattgctatatattgtttaacaaacaacacttagtccattagttacaataataatggtttacgtacttgcaatgtcaacataaaggtttcttaaatcttagagagatgtcaccactgttctgtaaacatcactttcacttaccctatttgcgctgtttttgcagcttctgggaaaaaaaatttccatggttcaaaaccatttggatcaaacactgcaccatgatcaagcagttgtgaatcacgttcacctgtgaggtcagaccacacgtaatttcttttgctttcccgtatcaaactcattggaaagacctgtaacaggactattcactttaagaaacgagttgtctgatctctgaatgtgtcagctgacttttctgagcttccgaaggaacaatgaagcaaattgatttcttccacaagacaaaaggtgatcatgctcccaggtggatcttcatattaatcggttgtaccatgatttataagcaggaccatcacattgttagcaattaacacaagcttgatcgatcagcgaagccaagaggtagaagagaagcttctgtgaggtaggtttgtacgcattgtgctgcttgtgcattgcatgtgtgctcgtggtccatagaaaaaggtacaattttatagtctatccaaacgcgtgccgtgcaaatccctttctttttttttcctgtttttcttaatgagatccttcggttctttgtctcaagactgtcaggtgtgttagctaagtgtcactctcaggaaatttatggcacttgtctaataattaactatatataaagctaaggaggctcaagatagtaaacccaagactatacatttcttgtgtgccataattattcatgaaaaatttcgcctttccgttcgttacacgcacacgttttattgccatgccaggacgccaaacttggagcgagctctccataaaacatatggatttctacggttttcacagaatttagttcagttttcataaattccttataaaatgccttaaacatatcccttctaccatgtttccttgtgtttgcaaaaaatgttccatatgctcgcagtgcatcatatcctgcaaagagagagaatggcacattatttttggctgtgtttagttcctttcaaccttacaacttttctgtcacatcaaatatttgtacacatgtatggagtattaaatgtagaaaaaaaaatcaattgcacagtttgcatgtaaattacgagacgaatcttttaagcctaattacgccatgatttgacaatgtggtgctacagtaaacatttgttaaggacggattaattaggctaaatagattcatctcgctgtttacatgcggaatctgtaatttattttgttattagtctacgtttaatactttaaatgcgtgtccgtgtaggttaattttttttgcgaaaacaacttaacacggccttttcccattcaaggcaagtaactttgcaagtggacgttcgtgagatctcatgatcagacggtgacggtgacaagttgacaactcttacatgaggattgacccgtcaaaagtcagaagaattctccaagctgtacctccaaattcacaagggacgaggactactcttaataacagtacgtgactccgtgttacagttatgtgaccaaccaggtagtgaccatgcatttatattgcatgataaacagctccccagaaccttgatagcacttcctttcatactttctagtagctaagaaaaaaaatactcttaaaaagctagtcaacatagattatcatgtaagattgaatttgatttataactcgagaaaaataaacaaactgaaaaagtgagagcatttgacattggatttctttgttcatccatggaccgaatttgaccttacatatgtagtgtttgttgtgagctaatatgtgatacaataatcttttgtttaaattttggtagtcactagcatattgcatatgcgttgcaacagatcattaacccgctattaccatattttttttatatatcacgtattaatttatacatatatttgttattccatctgttttataatgtaagactttctaccattgcacacatacatatagatgtgaatgaatttaaacacatgcatatgtctagattcattaacatctaaatgaatgtagccaatgctagaaaatcttacatcgtgaaacagagaaagtactgatatatggaccatctagccttacatcattttttttcttaaaaaaagagttggatggtagaggtgattgacatgtgttccctttaggactacaatccttttatcttttaacaaagggttaattggatccatgccactgcaaatatggcaaatcaaaaaaatgccacacatattcacgttatcggctagataccactgcaaatttttaaaatgagaaccatgccactcctgtcactattttcatcctcctctctcacgacgtcatcctcctctctctctctcacgtctgcacggggagaaggcgattagcaagaacgaggctgccgctggcgaggacagtcgcaagcgcagggagagggcgcagctgcagccgccgccgacgagcacggtcgcggaggggcatggccgctgccgaggacggtcacggagacgggcgcgggcgtagccgccgccggcgaggacgctcgcggggaggtcgggaagggggcatagctactgccgaggatggccgtgaaggcgggcgcgggcgtagctgctaccgccgaggacggtcgtgagcgaggccgccgccgccaccgaggacgctcgcggggaggtcgcggagggtgcgcagctgctgccgaggatggtcgtgtggagagaggagatgggcgtcggcagcaccagtgacaaagcttggggccaacggcggcggagctcgagggtcgacgcctcctccatcggtagcaacgacgagcggccctcctcgccagatctgggcagaggcggtgcggctcgtcgatgaccacgacgaggacaacaatggcggcggcgactcccgagctctcccgcgcagataaggtcgacgacggcgagggcggtgggtccaccgcggagatggtcaacgacgacggctgcaacggtggtggagagagaggaagtcggcgaggaggtcacggaggggcgcggggagcggacgctggcacgaccgtcgccggtgccgtgctgccatccgccaccgtgctgccgtgctgccatccgcgcctgccttcgtactgccgtgctggtgctgccgttgagacgaggacgacgagaagatgaagacggagacggcggaaaatgtgacagattggacggaaatcatgatggagtggcatggttcttattttaaaaatttgcagtggcatccagccgataacgcgaatatgtgtggcatttttttgatttgccacatttgcagtggcatggatccaattaaccctttaacaaaagtagggagttgatagtggaccgtggggtggtactgccaccactactatttcaaaagtagtatagatttagggtgtgttccccggcacgtaaaacggattttttttaagtattcgattaattaagtattaactatttttttttaaaaaaatagattaatatgattttttaaatcaacttttgtatagaatttttttacaaaaaaacacaccttttgacaatttgaaaagcgtgcgtgcggaaaacgagatatgtgagttagaaaaactgagataataactcagccttagatcctatgcataaaataaaataagatatctcttgttttcatgttaattgggttttttcacatctcttttggtttctgacaaaaaatagggaattgggtagggcttataagccacgactataatttaaacttgaaacttaattttgggttttttttattttattgttttctatttttaggcttcgcttttgggccataaagaatagaagtataaatgttttaattactctaaaagtaaacttgctgacatggtaatttgcccatttgctgacacttattatacacgtgttgtgctcagatggtaatttgcacacgccattcacatggtcgagaaatggcagtatcaagtgcagaggaaagtgtcattgttactttgttagttcgttgacagtcagaaagacaaacatcctattcctatctcctttctttgaaaaaacattcccgtgcatgcatgcatgtttgatcttctaattaaggccatgtttagtttccagaatgtttttttcaaaaacatcacatcgaatcttcaaacacatgcatgaagcattaaatatagataaaaacaaaaactaattgcatagttagggggaaaattgcgagacgaatcttttgagcctaattagtccttgattagccataagtgctatagtaacccacatgtactaatgatggattaattaggctcaaaacattcgtctcgcggtttccatgcgatttatgaaattagtttttttattcgtgtccaaaaacccctttcgatatccggtcaaacgtctaatatgacacctaaaaattttcatttcacgaactaaacgggcctaactgaactctgcacaagtactaccaaaagttgctgtgattattgcgttgcggcagcaagtgcatgcacggatttgaaatcttaatttggacgcttgaagagaagtattagcgctatttggttagcaactaattttgtcacacgtcgctttaggtaaaccacacttctttcagaagatagtgttggtttatatcataactctattttatctaaattttaatcacctggcccacatgtcatacacaatatttcttgtctattttttttctaagcttagtttattatttgagtgaaatacatggccggtccctaaatttgtgttgtggtgtcagttagatccgtgaacttgaaacttgtacatttagatccgtgaacttggtttaatgtaccaactcggtccaaacgtcctttgagtgcgtttgaccgccaacgtagcatgccacgtaggcaacacttttgctcttagccccctccacatcacaattcacaacacgtcgcatatatctccttgtagctatatagtgacaccagaatccaaaaaaaaaaatcctcaaatctccatattattcttctccttgcatgtgtagaaaatgcggtcctgattagcaattgccattgctctgcgctccaaaatgaccttatcattgcataacgggctcttgatcaacaacaccttcttccggcgacttcaagaagaggacaagcttggagaatcaggatacctagcgtgcaagccgcattgcgctgcctcccattgctaatccgaccgcactgtgccaccactaaccctgctgcactgcgctgcctcctgccactaatctcattgtcgaggtcatcatagctgttacctctcggcctccttccgttaatataaccgttgaaaccctaaccgatttagggatattttgggagatttgggttgaaatgcattggtcagggcaagttatgttcgaaggtatatgtggaggggcctgagcacaaaagtgttgcctacgtggacgatcaaacgtagtcaaacgacgattggaccggggatggtacattaaaccaagtttaccgatctaaacgtgcaattttcaagttcacggagctaagtaacaccaccccataaatttaaggaccggcctatgtatttcactcttattattttgtttgccaaaagatgtgataagacaaaacttagtcatcttaatacaaaatgtgaggcaacggtagttaccatagtcgccttagtttacctaatgctatgttttttcatcatgtgtaatagcgtgtgtttgttttacgttttgacagtgatgaagctgatgaagaagctaccctgggctcctttgcattgaggattgtaatatgaattttggaggatttaatttttcaaaagaaaaattcctacataatcatttcattcataggaaagaatagaaattcttttacaaaactaaattcttacgacttagttttataggaaaataagtgagaggtccaacctcatagaaactatcatttgctttatttgtttccggtgatgtaccaaagggatactatttgacgtacatgtattttacatttctctaaaattagatatttctctaaaattagataaacatgtgacgctgatttttttcacacgtttaatcattcgtcttattcataaaatatatgtaataataatttattgttgtgagttgttaaatcactcaaagtattttaggcatgatttatatcctatacattatacattttttaaataaaacaaatgtatatttaaaagtcaatggaattatttattaaaaaatagagggagttttttctgttcagttttattgtatcccgtgttttaaagggccctacatacggttttatcaacgtgtctcgtgctgtggccactgccgtgaagaagtagaagtgggtgaacgtttaaatttgcaagtcaccatcatgtcataaaagatgctacatctcatttttccgagttaatttaattaaatactccttaattccatttgtgctcatatctcactgtctggcatagatccttaattccttgtgtcactgatatatggaccgcagcatctttctatagctttttccgattgtcacgcattgagacaaaagattactgtgtctttttcacctcttgatcaatggattgaagagttgaactattgcgactagtaggaacaaaaaagatcggaaacacacggaaactagctatttgtattcgttttcattttttaattggaattaggataaaaacatcgatataaaaataaaatcgaatattatcgaataaagatatggagcgactacgaaacaaaacgaatatagcaatgattacttatcggaatataaaaaacccctctaattgggttttctgaatcaatgaaaaagatattgcttgttatttttttaaaataataagtcaacatttctaaattctatatggtcaattacctacacggttccataaacatttgtgaaaattaatttttatagttgattcttaacccacatgtaaaaatgatttttcacttccttgagagatccttaatttatgtatatatacttttttaaaaaaaattgatccctacgtacggatatccggataaaactgcggatagttcccaacattttccgatatccatcggatgctagtcctaccatattcatttccgttttaaaaaaaaactatccgtatccgtttccgtattcggcactatccgtaaattatccattgggactatccgtcaccgactagtgattgcaatttttcgctaccctccagcatgcaaatatctcacccgaaattctcttttttcttcaaaatttattaaatttctaaataattttgtgtaaaatgttccgaaactacagaaattttggggtcaatttcggtgacctcgaaatttctggaatttcggtgaaaaacaaaagtgtaaaccccgattgcgacaccgaactgatatactgtgttgtatatatcacatcgcccagttggatcattgtatattccagttctaccttgcaaaatgtcacatgcttgaaaatgacgtctttaaaatttgcctatgtgacaagttgctgctagaagaacatgaaggctttttatcaaagctttagctcatgaaatagacatgttaataagcctgagctcattttgcagtgtgtgatgtgcgtgcagatcagatcacatacatcaaattaagtaattaagcacaacctcaactaccccccctaaaacatttttttccctaaaaggggagttaaaatacaatgaacatttctgcatatataaccttactgacaaaacttgcctcactacttttcatattggtgagtactatttacccataatgctttgaataagataccatttagcatgcaagacatatgcacacgaccatcgcaaaatatcgttaattctttgaaaaaacgtttcgaacgtgtagaaactaaattaatggccgtctattctagttaatgaatttgtgtgtgtgtggggcagctaagctaccatcaatgccagctgatcccatgcataatgcattaatcgatgcatgtaattagtatcggaagtaggagtctcgcgtgtcaaagctccaaagcgaagcgctgctctcatctacgacgtcgaccatgtcgtcgtcgcacgacggcaacggcggcgacggcggcggcggctgcaagaagtcgtaggcatggccgccgccccagccgggcggcgagtacagcggcggcgggtgcgccatgaccgggcgccagtcgatgctgccgtcggcgcgcacggcgggcgccaccacctcgctgccggtggcgaaccccggcggcggcgacagcgagggcggcgacatgagcgccgcggccgcctgctgcggcgtgacgtgggcgcggttggcgtgggagagcgcggcggcctgcacctgccgcgggtcgctgctgcgggcgtcgcacgacggcggcgagtccgggaagttgaggtcggcgccggcggcgccgtggccgcggagcgtgacgaaggcggcgtcgaacgcccgcgccgccttctccggcgagtcgtaggagcccagccagatgcggtcgcggctattgggcagccggatctccgacacccacttcccccacttccgccgccgcacacccttgtacttcttctccatctccggcggtgacgccaccaccggcgacgacgatgacatcatgcagtgacgttgcacgtacgtgtacgtgctgtgttgatggtggctttgggtttgcttgctgctggatcatcctggcggggtcgcctcggctacttataccgtcgccatgcgtcgtcgggtgcgacgcgttgactcgccatggcgcgtcggacggcgacgtgcaaggtgtcagccagcaaccaaagcttagcgaggcgatgctactacgactaggttgaggttgatttcgatcctaacttggattctactagatatatcggccggtgggccttttgtctttattcgatatactcttttttaaagacaaaaattatgttatgatagcataattattagttactacctccgtttcagattagaaggctttctaatattgctcacattcatatagatgttaatgaatctagacatacatatatatctagattcattagcatatatatgaatgtgagcaatgttaaaaagtcttataatatgaaacggagaaagtatgttgttatcatcaactgttgaggcactctgttttagtataatgagattattttctgaatagtggatggaacatgtaccgggcaaattaaggagaagggattacctataaatttttctgaccaatggatataacccattttaaatacaataaaaaataaacatgtcaaaaatcgtaaatctacagaaaaacccattgtaaaatctaattttgatacaccgtaattgcgtgtaagtgctgcgtaactgattgtactataagttgatatataagaatataattcttgatgcaagattttgtgaatgaaaaagtgaaagatacgaacctaaatatatcgcaagtgaaatagcaaatcctgaagagaaaatgtgtattaatgcaaaatgaactgcacaaaatgtgtctcttactctcttgatacaaaggcacaagtgcattgttaaagaagaacatgtctctacaactgcaaatcacctccgtgttgaaaatatcactggattaatgaacatccatgctaccaaattactactaccagatatgcttcacgtactactactccagcacaaaatgatttccgtcaaacaattcatcgccattcatccatgaatcttgaccgctgtcctttgttcttaagttgcgcgagcaaaattaaagcattgctcatgatcgtggctgcagtttattttattttttaacctgtctcatttaaatataaaaaataaacactacaatatgtattttgaaaacaacctttttagccgcaccacctatgctagtcaaatatttttcattgttgtcacgccaaagtctttcttttaggtaagattgtgttgtcactaacgaggatgacatgaacaagaggttttagatttaatagtaagttttgattggtttattttttaaattatatgaaagtggagttaaaagaaataagagaattggggtgcaccggatatccatggcccctccgataccagtttttctttgataacgtgtggtgtggcaacaaccctgagttccgacaggtcggaatgaaacctaaagaacaaaagtggattccctactagcacctttctggcactgcaccgcatgatgattgggctaagtaaactggatccgtcagcagtaagaatgggtcaaataggtaaagtggaatagttagctcatgtgactaatatgatccttaatgcaatctactcgattgactggttgaatttcttttcatcaagataaaaataaaattaactcgtctgataaaaccaataaattatatgcatacatctaaccaattagtattaagatgactaatttaatttactacatatagattacaaatatgtccatctcatttaaaaaacaaaaaataaaacatactttagattttttttttatgtctgccttagaattttgaatggacaaagtacacgatataaacatcttggtgacacagattccaatacaattgggtgtgaggggaatccaagcaattaaaatttcaaaaattaatcaataagataactaaaagataatatttttttgcttaaccttaatacttattaaataatctagaaaaaatatatttagaaatagagggagtaacatggatcaagtctaatgtaaaattatttagaaataaaggaagtctaatgtaaaattaaggcacattcatatttatttatttatgatattctattactccatagtatattgggaattaacggacatgtatattttttattacctcaagatactccctagaaagtgacaattttttttcctttcagagttaattatacgtggttaatttgagccacgatactttattattcctttgaagttattagtgtcatgttcatgcattatgagttaccacgagaccataaaaaaagcatgtaacctagcggtcgtaataacctgagtagcatccaaaagtcctaagtttaaatctatatatgagcgaattttatattggattgtttgtgggactaagttctcaacttaaatggctgcatatatccgattagatgtaaaggccgggtaaacaatatttttctctaaaaaataataaaaaagttactgcaagattgaaattatactagttgatttttgtctggaaacacaaatctttaggtgcggtggtctttttactaacaaccttttacgtggggaactaaggttgagttcttatcccagttttcccaactcacatctcttgtttttcgcgcacacacttttcaaattactaaacattgtgtttttttgtaaaaaaaaattatacgaaagttattttaaaaaaaatcatattcatccattttttttaaaaaaattagttaatacataattaatcgtgcaataatatgttttttttgttgtgcatgtcggggaggagttcccaacccatcctcctgaagacagcctaagatgatggggagaaggcggaggacgactcggcttataaagtattcacagtaaatttagtcgtataattttacagttaccaggctacgcacgcatccattttttcttttttgtcaaaatcaatactgtttgactacaccgcatgcatcgctctctcctttattcgatactacagtgatctgtcactatgcagtagtaccagttttggatcataatcatacagggagatccgagatttggccgccgtaaaataaagttggatatagatggactttgaactttgaattcaagagctatatagctgctgcctggaatcacacatactagagtactcctggaggagtactgtatcatgaatgaattggaggctggagctagctagcacagcagagacgacacagaacggtcagagagtcaaagcatggaagcggtttgacctcgcggctcgcgcgcggtcggtcggtcgggctcccagcctcccaagcggcggggcgaggcgaggcgaggagctgtagtgagaaaggagtacgtggagacggctcgccatggcgaccatggaacggatcgtgcgattccggcttgacgaacggctttggccttggccggctcgctcgcttgctgctgctacctgccaaggagatcgtgtcgctccggccgcgagaccctgccagcgcgtgccatcggttgcggccacgtagtacgagcgcgcgggtgtctccgcatagttgcgagtcaagagcaacaacaatagcatactataacctataaccagctataaatatatttcaaaaagataataagataggagagagaaaaatagcgggctacagatttattgcagctgctgcaagacgaactccatgattccaaaatatatgtgtatatgataggtatgatcatgtattaattgggtagtactccctctgtcccaaaatataacaatttgggacatgatggaacacatcacatcctagtcgtcgatatgtcccatccaatactaggttgttatattttaagacggatatagtatatgtttataggtaactattatatgaattgactatagataattggagtagttggctatactattaaatttgctctaaggctatgttatgtgagactcacctcctgatacgggagcaatagattagcatacaattattaagtattagctaaaaacattaaaaaataagttaatacgattttttcaaagcaactttcctataattttcttttttgctaaaaaaaacacactgcgtggaaaaagaggagaatgagttggaacaagcacaaacaaactgaaggggttgttcactaaagaatactgttttcaacacaactctaccatattttggtaattttggaatcttcaattctcgtaaacttctaccgaaatttgaaaaggcctcacgtcaaagaccgcaaacctttctttaccacaataaaatttggtaatacaaaatttgatattactaaaaaatgttaaggtttgaacaagctcgaaatgttgagtcgttgtacttcagaacaaaatgttgaatggttgttattcaaatgaaaaataaaatgttgaatgattgacttgtcacttgtcagggccctgaccgagatacgtgcggcaagcaactgatggtttatgtggtgctacaagcatatgctagagctaagcgcggtagcgccgcggcgctggtgtttttgtggttctttgtcgaatagttgtcgcggcacgtatctcggtcggtcgagacgtgtagagctcgcggtcggagttcgtgaggcggacaaaaaaaaaaggagggtgcatgaggatacatgggattgtgggtgagacaatgaggggacaagaatagaggtggaatatgaaaggtgctctgggaattttagcgaagattcacaatgtaatggtgatggcttagataggatatgtacaaatttgtcgatatttttcagttgtgttgtagtagggcatgaacaaaggtaaagtctaagatggatggtcttttagttaacgcatatcacttagagactattctactacaatagttaagacaacaagaactcttgatcattagtgcaccaaaaattttttttatacccttctttccttttctccacctccatgtaacaaaatttcctttaataaacgttaagagtcgactctgacccgttgttatgcgtagcaactatgtttccctttcctccattctctctcttccacatcatcaattttacttgcatgggaacgaagagaatccgttattacacaccgttgtacatgcccttacaatttcattctcaagtctcaacttagcttctaaaatctgcattaatccattctacacgttagatttttgttctttgttcacatcgtaccccacttacacgttcatcgtttctacgtgtaaaaggtttaactcatcaagacttataagctaacccttacccagctaaactttctaatattatacttaaaacacattgctaacacttatgggctacttaggccaccaccaaatagtgacacgtgaatcagctatttgagctgagctatttgtgacacgtgaaaccaggtgaataattagcacataattaactaactattatatatttcctccgttttttaatagatgacgtcgttgattttttctcacatgtttgaccattcgtcttattcaaaaattttatgtaaatgtataagatataaattacacttaaagtactatgagtgataaaacaactcataacaaaataaattataattacgtaaattttttgaataagacgaatggtcaaacatgtaagaaaaagtcaacggcgtcatctattaaaaacggaggtagtacttgaagatagattaatttgatttttttaaaaaaaaacttcaatatgaaaagtttttgtaaagtacacatcatttaggagtataggaaacgtgctaatgaaaatcgaggaactaatgaaaatcgaggaagtaacccaacaaaatatccatgtcgaatgggaccttaagcacgcataccaagcgctagtatcacgggcctatttggtagtaacttaggagatgaaggggagtttagagggagttgatggcaggatagtcataagagtttggtttttgttcttaatctagttccgagacaaagtttagttcgactttttaagtgatgatggatggctcttcccacccccaccccggtattaaaagcgagggagttagaggacaaactctccaccccaatcccacctaaaactcccacatccacagtccaaagtccaaaccctgtactctcattccctcaatctcagaagagaggaaattccctaccaattcgcacctcctacctggtacttaaaaagtagtgagttcaacgataaccccccggttcccctatgcccaataagctcccaaccaaaccccaccattgattggtgccgtaagggttcaaattctagcgtctacgattaataaatggatatgtgcatcctgattggtgcaaaggttaggagttattctcccatttttctataaatcattacaaagctgaaaacaaccaaaaaaagttggcattcattataatttatcagtatgatataccaccaccccaattttggtgtaacaaaaggggattcgagtggctttaatgttatctccaggagcaatattttccaaaaaagatggttgctgaaagggcatagtacgatggatggctcagctgagcgcacctggtaattcaggagaggacagccattagatctgacacccgcaacactatgtagctcgtgccatcagagcccttgaactcgctgccagcatatttggaatatagaacagtgctgcctgcagagaccgacaatggaatcctcttgccttcctcatccagaggaccagggccaacagccacgacctgtcaccaatcaaccaacacatcattacctccttaactttgatcaaaaccacaaaatatccagcagaactaacaaattgagtgactgaccgttccaatagacggcttctcctttgttgtttcagtaagcaataggccaccaggagttttatcttcagcttcagcgacctatagtatgagaaaagggtaggaaaacaggaagaaattattacaatcaaaaggagggcggcctcagctttagttggccatgcctacttaatcaacaacattacactgctatccagacaaatgtataagaaatgtccaccttgataagaacacgatcgctaagaggcttcatgtcctttgcatcatcagtctccagaataccaatgatgtcatcctctttaagaatcagatggttggaatcattcaactccacctctgttccagcatattttgaatatacgacttgggatccaacctatgcaagtcacatatgtgcattttagtatatattcttttgtttgccaacagtaatagcttgtttacactcaaaatgatcacacttcgagaaatttaaaaaaacaatcaagtaagattcacctcaataaaatatgaaacatcttaagtcaaaacaggcaacataaatcctttaacaactttatcatacccgacttttcagcatgctcattattggattattagccacgggtccaatgctaaatccgccagttttactctttttgtttcaggtctgatttctgtattcatgtacctggaggctggaacaggcgagcctcgcaccttattattattctataatagttctttggacaggttggttggaacctaccaaccaaatgatacatggaaacaaatgctccagacaactggaagaaacaatgctttatgatccatgaatgactagtcgaatagctgtaccagtaaggctcattgattctgttagaaagcatcatacatattttttcactatattgcaaagaaaaatatacctgaatgctaacttccactttgttatccccaacagttcgtccctccccaatggcaactacctcacccccttggggtttagactgagcagccgaaggaagcaaaatcccaccagttgtcttctgctcagcagacttaatctttacaagcactctatcagccaagggcttgagcgttgtatactgcaagtgaataacagaacataacttcatcactgaaaagcataacaaatatattttctggaaaataaactaaaatattaagcatagaattgctttcaaccccccccccccctttcgatatcttcactgaatccatagtgtacttgtaagtcattattttattgctcataataattaaaatataaagtatagagtagctataattcacttcattactcttttattacaaggatacataattcattttttttccaaaactgatttgcacttcatcattcatcagtctgacagtaagttcggtagtcaacgtgggaaagcagcgatagacacatcacagctcactgcatcacaatcttaaaacttcctaatcagcaatcaccatgagctaaccaccacagcaatacaggtgtgtacagggcacaccgtacaccagacgggctcggatatccatctatcaccattcatcattaaattcaacagaaataaatcagttaacccagcggaatcatcgtcgatttcatcgctatcgtaatagcattgcccgcaatacccaatccagcgattcaccaactaaccctctaagtgaaaaactctgaaccgagaatagcattaccagtgtgcccaccatggtacattgcactgaaaacgcaccttcggggcgacgctggcggcggcggccctgacgacgaggccgcgtgacggccgcggcgcctggcggagcacccggacggccgccggcggcgggaggcggagcgcgtcgcgggaggccatccccttcgtagcgaaggccaccgcgccaactccagcggcggagaactgcacgggcgccatctccggtggattgctcgccgcgaaatccgagcggcagcaggagataaaccctagagcagcggaagcgcagcgcggagagagcagcagcagcagcagcagccgacgcgaagcggagggggaggagacgctttatcccaaacggcgaacgcgcacgaaggtgacaaaatatttttgtgggcttgtttgggcccaaaccaatgggggctactatataaaaattcttctcaaaatttatcaaatataaatataatatatataattataatgtgattacattattataatttacatgtaactacaatataatatatatgtaattttaataatttctttacaatatgctattttcgtgaaacaaagatcgtgagactgaatcttctcacctgtgtgcgtgctatgattcttttcttcccaacttacataaattttaaagttaacctaatggttttaaaatatatgaaggtaatacattgtagttacatgtaagttaggatggaattgcacatttgacaaatttttgtcgaagcaaaattgaatcgatacaatttaacgcccattttgattttgggccaacgctagtgtacttcccacggcccattttgaagccattaggcccagaagtgttcgtcacttcagcccgttcgaactgtctcgtggccaccggcgaggaatcagccatggccggcggcggtggcgcctccccttcctgcgcggcggtcgccggttggaccgtgaccgcagtgcttctgcaggtggttggcctctccatgttcctctacggcttcttccccgtcaagcccacgctgcccgggttcaggttcgcgcctctacctctgctctgctctatcagcggctgtcgatggcgcttgcttcgattgacccttggttggtggccgcagtggagcggagagctaccggatgccgtcgtgtggtctcgccggtggcggggagcaaccggcgcttccgccggatcagctcagatctctgtacagggtgagacatctcggttcctccggcttaggttcatctcatgctgctgcgcattacttgtgatagagagatggaagatttgaaatgttaagttaattcatactgtgcagtgtttttttagtgttgcgatgctcatgcttgtgctatgattaattccaggaactctccgaggtccctcctgtgtatgatcgtttggtgttgatggtatgcacaaaattgatgtgcctgttcttctcacagcataatcctaggcgcttcagtggcaactttattcttacccttttaatgtttggcattttgagtttatgcgtgtcaatttaggttatagatgggcttcctgctgaattcgtattggggagagttggaaaacctccaagcaaagaaatggtggaatccatgccctacacccaatctctgttagctggttgcaaagcaacaggttatcatgcgaaagctgcacctccaaccgtcacgatgccacggctaaaagtaagactgattctatatagaggttcctatttgtgtaagtatttggtaatcctaaatatgttatactttcaggcaatggtatctggggcaattggaggttttctagatgtagcatttaacttcaatactcaagccttcttggatgacaatcttcttggttagaacctctccatacctgaccttatccttctcttgtattaatcatcttctttgcatacctaattgccaacatggtgagttcaacatgttggtcaaattcatcatcctctgtgttctgcgtcatccatcagttctggcctgaccaaacaagaaaatgccttatgagctatatttataatatgttcacaccaatgcagatcagctccacatgattggttataagttagtgatgctgggagatgagacatggatcaaattgttcccaaaattattctggagacaagatggagtgagcagtttttatgtgagttcctctcatgcatcacatgctttttttttcacaagataatgtgattgaaagatgagagtgtacttgaacttggaatactgataaaataaacttactatcgtgtgaaactctaatctaacagtaggttgccaactatagatatttgtgtattaggtattttaagcttgtgatttggtgcttgggttttgctaataggctaatagcagtcctctttgttttgcattcagtctttctacctgtataacttaatttaatgattgtgactggatgtcaggtgaaagatacggttgaggttgattttaatgtttctcgtcatctggaatctgagtttgctgccaaagactggaacatgttggtatgttcttggcttagttcatgttcacttgttctattcctttgtgaacttatagtaaaatataggtctttggattacaacaatttattccaagtatccaattaatgtttcttgtgataagtgttctaacaatctttacactgtcttcccttgtttgtgctgtttcctaaggttatcctgcaagtgttctattcttatgtactaatcaggtttgttttgtttgttaatttcagattctccactatttgggcttagatcatgttggccacattggtggccgtcagaggtaaataccatacatcttccatgcctttttctatttgaatggtgtctaagtaaagttaaaattttaaaatttacagtgttttgatgccccaaaagctgaaggagatggatgatgtgattagaagagtgcacaatgccgtatcaggccttgaagataatttggacagaacacttttggtttgtgatcctatctgagtcctataaattttgtaagattcctggtagcatgtatgtttgtgacaaacaagtttgatcctacatctgtaagagattactacaaagtccactagtgaatggtgaagtttgtagtgatgatttgatacatgtatgcttaataacttttattctggcgcctttctaaatagtagtgatgtttattgattgtggtttctgattatctgatgggttatccttgcaaaaaaaataattatttgatgtgttaataactcaaaaattgttttcattatttttttgattgtattgtatttgctttggattcgcagcaaactataatagcttgttaagttcagtagtgtttacaaccgttgatcaagtctgtgccttttctggaaagataaaggtctacattaaatctcataggcatatttctgccgcccgacatttcaggttgtggttagtgatcatggcatgaccgaaggtggtaatcatggaggatcctcttatgaagaaactgactcccttgccctttttataggacacagtgttcagagttcatattgttcaccttatgaccagaatgaagcacttcaggtataactcttactctatcactgaatgtagtttcatcctttctttatctctggatacctatggcaaatccactcatcgagtatgttttcatatataaatcattgttgttgttgaatattttatttataaaccactcattttgtcatcatctaagctatacttgcgaacaatcctaaagtagtgttccattgactactcttttttctttgtcaggtggaccttgcgccaacattatctctcctctttgggacaccaattccgaagaacaatataggtgttgtgcttccagaggtttttaattctttgacaggtgaatctatccttaccttctgttttcagtttcttgcgcttcatcaggatgcaggatacttcataaaaaaatttaagatatttgatgcatgtcgactttataacgatttcaataggtaataggattttgatggatttataatcatgtgtcccgatgcctttagttgattgctatgtctatatctatactatctcaaaagatgttagtggtagttgtgggtctgccaccaccaccacccaactaccatgtaagacccacgaacagtgagacaagactttgtgatgtctgacccctatagctaactgaacagtcacctagaaagtaacagcagaattagtatgatgataatatattagactatatttttataggctttaaaatatatgtaatgagctattttaaaaaaaatccgttgcaacacaggcattatgctagttctcagttaaactggtggtctggaatattggaattttacaaattgcatgattcagtactcaaaactcttcagctcaaaatatgatgagtgcatcttatttcagatcagcaaaaactgcggaccttagagctgaactcattgcaattcttaagattgttgcaagcacagttacctgctttctgctttgaggattgcattaattcaaagtatggtctaggaattgataaaattcctcaatctgttgagaagaagttgtgtcatttgctttctaaagcttttgattcccaccatccttcacaccttcatcagacatctaatgtcaagtaagcgtctgctgttaaaatcctctaaactgttgtgaatatgatcaaccttcacttcttaaaaatacatcctttttcaggtccattgaagctgggtgcaacaggactgctgtcaacgcctactatgaattcttaagatatgcgagtgagtggttgtctcacagagcgaccaatgtaattttactatctttgcaaccctagtgtgaagtagcattctgttacatttttcctttcaccttaagatcaaattgatttgttttccttttactgttatatttgcagaaaccattctatttacttgtctctgcgatctcattgatgattgtttcatgcctttctctcatggggattgtctcttgcctacttaagggaaagtctctgagtcagtttgaacatcattctgagtggaattcagattaccattggcaccttgatgaagtgttcattatcatggggatttttctttatgtcagcagtcttggatcaagctcttttgtggaagaagaacagtatacatggcactatctcacttctactctgtatttaatatttctcatcaagacgacacaatcaatgctgagagaatcaaattcagcggtagcacgagcagaaggcaagatttttcatggaaatgactgctcttattttactagctgtaaattaatccccagtatgcgagacggttacaagttgtgcactatcattatcattcttgtttctgggagaattctaagagcttggcatcaaggtggggttaactgggttcactttcctgacatttcaaagtcactggcccaagctgattcatttgttgtaaaggctcttcaaattatctccgttcttgcagttgtggtattgtattcagtttcactcctgttactgagaccaaggaagctgaatattctgctcgtatggttgagtcactttttttgtggaattttggttgtactccatatctggcaaagccagatcaatacttcactaccaaccaaacatagcacaacatcaatagctcagatattttatgtcatcgcaagtatttcattaacattcacttttgttgcatcaccttggatatttccaatacattctatggaagcagaaccaacatcctctggctcgagtcctaaaacggcaatacatctgcaaggcataaatcattctatgttcctgattggaataacatacgcggctttctggtgccttctgcaattgcttctgcagcagcccataaatgcaatacctcttctgctcattttcttgcaaataatctctagtataatgcatttttctctggataaatcattgcataagaaatgggtacaggttagttcctttaaatattattaatatttgcttaccaatatgatatttttcatgaatattggcatggtatgaaatggtttactaatgagtaatcatcgttgatgaactgtgtagattgtcgcaatgcaattattggggttgtctggtcattttggtcttggaaacaccaataaccttgccagcattgatgttgctggagctttcattgtaagtttaacaaagacttagttaagtgccttttatcctcattgcattctggtttgactagtgaatttcaacagggcatttcaagttactccacagttctttctggcatattgatgttcatgattacatatggatcacctctgctgttgtaccttgggatggttttttatatatcagtgataaacagtgatgatatctctactccacatcaatcgaaatggagctgcattttggacaaaatgatcacgttgccctgtttgcttcctttgctcattaattctattgccttgacatcgtacaccattgttttgctgctcatgaggaaccacttgtttgtttggagcgtattttcaccgaagtgagtattcgataatctatctttttaaaccagaataggtgactgcagccgtactctagagactgtaaccatatgaactaatgccactagcatgcccatcacattgctgcatactgcatagaacatgtgaaaccaaataaaagaaatttatggcgttttcaagtttccaattccgatcttccttaacgaaaactagatgcagaactgcgaccagattgttttcacttgctgcaacgtttatcattgatagagacttcttactgaatcagcacatcaagctcttatatactacatctggttgttgttgttgttgttttatggacagttttcatttccaatgcatacaggtacctttatgtttgtgcagcgacagtatgcacttgcgctggagtgttcattatagccgtgacagcagtttacacttgcactgttttttccttcaggatgagaaactacaaggataaatcctataattagttttaaaattagtagttcttatatagtcatttatcagaaaggaagagtaacattgccttcatcgagaaccttttttacggtgtgtttttttttttggggggggggggggggcggggtccattttgttgtctagtttagaaaaactttagatcatacaattccctcttcaagggtgtaaacacacatatctagagattttctgatgtatgtatttctgttatactagcatgttcaacttgaatatttgttctctattattagtctggtaaatgttgcggtttgcatggttcaactggggatgttgtcttcgaaattcgacagtcacattggaaatatacgatgcaaattccagagtataaactgcgaggttactacagtatatagatgcaatttccagagagtaacatgggagcaggttactccagaggagtgaaagccatgtgatcgatgagtttattcaaacgaatcgacatatttacaattggacggatacactgttggagtgttgaatggctgatatatttacaatgaacgggcttatatgtacaaaggaatcacaaaccggaggtggtctgatacaaatgatacaggtaaacacagggagggaggtgtcctccaaccattagatcaggtgcaagatactatagaccaggcccacatgttcataacaaatgtggtctgagctgaaatctttcctgacacatgaactaactgtcaatcaacctgtgaacctgtggtggaggatctcgatagaattacatcatcatataattgagtgtactacaatgttttggcaaaagtattttccccttgacagatggcacggggaagcaacatcgttgccgtagtcacacaatgtacacagcaccacaacgaccagccatggactattcacagaaacttggatgctacacggcaggaagtccagaaggcagcagttgctgcttttagaattgctggattctggtagatgctgcatggaagcaagacggtaacacaatcggtcagttagctctagttacacagacaccaaaaagagcaaatatatgcaccctcatcaggtactcatcagctgtgggcttatagctacatgattaaatcaaagatgccactctctatccaaggatgcaataaatctaattatttaaatgcttgaaaagtgtaagttgtaaaaatacttttagaggaaatggcactgctcaacaggtggaagaaactaacctaactaatcagaggtaaactaccaattcaaaagctcacagaattctaacggcttatgcagcccctgtagtagaaactaatatggggagtttctagagaaaccaatgcttggcaattgtccagatcaatacaccattctttgatatgatgttagcgaaccactttagatcatcctaaaccaccttagatcatcctaaacattggttacaagtagactagtaacaatagcttacccaatagcagttgcactccatgatgctatattataaataacttttgttccatcccatgctttctgaagcttgcttttcctcttcttagctgaaaaggtcttgctaagagctggcaaaaatggaaggtgggagttaagtttttctgcattgacataattcatctgaatttataaaagaatgacaagattaccttgttgaagttgattaggtgtcaagtcctgcacatgaaatttatcaacatcaaatgtatgaaattttctcaataaggcatatgaaattctcttccatgataataatctagtaaccaagacacaggggaaaaaacatgataggaatcatgattttttgtaccatgtcaagaaaaacaatagtaactgtaaacatgatatttttggtcagatacctaatattcttcacaacagagtagtaagaccaaatacagaggaataaataaagacattaagggataaaaatcgaatattaaaattgtgtattaaattttgctaccttagtttgtttcagcgacagcaagtatgcagccatgaagcttgcaataccatcaactatgtcctcttgtttaatgagaacatatccatcctctgaatcatcactaatgttcatacccttgtcaatgtcgtcccatatgtctgccgcacttatgatatcccatgatatagtttcatctactgttacaagagcaattgtggaacacttcagttgtcaggtttagtgcaaggaaaattattagcaaaaattttagcatgttgtgccaaggaagtgtatctattgatttataggtacaatcccaaacataaaaaggaaatatgcacctgcaccattttgatataccgacttctgaatattatcgagtttttcaagaaattcaggcgatgcaaccctcgatttgagaagatcgcacaactgcaaagtaaagagtgaactaaaaactttagtatacttatagaacaaaagaaataggtataataaaacctagcacctatttttatatgataggccagaccgccagaaaacagtttaggacagttcatcaagaaactgaattcaaaaggatatgacaacacaaacacctacgtccagtcaaccatggtaaacaagatacctgtcattcaagacactatgaagactaagagccactaatcaaactattcgaagatccatagttcattatatttgcaaactgtcaagttcccccctgtgacacaattgatttgacgatccatagctttctcacctttttttttttttttgctaaacaacatagctgcacgttttgattggccaatacaaaacacacttttcttcttccacaatcacattttaccgcaattatatacagcaagcagccataattagcttagctaaatagtggactcaacacacgacacgttacgacaccagagaaacatcatagcaacaagggagagccaaattatggcgccatcatgtcattcatacaaggctaattccgtgtaaatttcagctaattccagtaggctaccaattctaatccagctaatccgcgaacatttggagcatatgacattcacaaacgcctaaatgtcatgaattaccgatcatcaatcaatcgagccatcgacgttacctggattaccgaatcacctacaaaccccccggatcacaaaattgagaggcacagctctctcccccctcctcacctcgtccgtctcgtagtcggcctccgacggcggagacggcggcggcgcaccctcctcatcacacccgtcgctgccccccacctccggattcgccgccacggcgtcggcgccctcctcctcctcctcctcctcagacacggcgatgcccagatcagcctcccgcatcatctcgagcgcgcgctggcactgctccagcaccgtctccagcgtcctccgccgcagcttcagctctgccgcctccggcaccctcctccccgcagccgcggcttccggcgccggcgccggcgacgaggaggaggcgggctccatcgaaaccctagatatgggcgtgcacggcggcggcggcggcggctcgatccgtcgtggcttcgcttggcggtttggtctaactcgacgacggtggaggggatggagagggaggcgggctcgcgtggatgcgtcgccgtgctcgaccaaatcaccaaattttgcttctcttcgcgataagggagaggtcagaagccacggtggagtagccgccgcgctaacgttgcttgcaagccagccagcgagcgagccccactgacaggtggggccagtcatatggaggccccacacatgtcagtgtgagtgtaggttcacccgatagatccaccatgtggttgttagccgtaaataatactacaacgaagaggggggtaaaagggcgagggaatctccggagagacctcgtcacttgcggacctgcggtatgttataaattgaccgtgattaattagcaattaattatataaattgaccgcgaccaattagctagtggtactaatgagtactccgtccgtcccaaaatatagcaatcttgtactggatgagatacatcctagtacaagattgctatattttgggacggagggattactaggactaggctagtagcaaaccggtcgcaactcgcaatgaccactggctgtgttttccctctccttttctaattcacctctcttttttttcacgcgcacacttttcaaactgctaaagatacgtttttaaaaaataaatatacaaaagttacttttaaaaattatattaattcatttttcaaaaaatagctaatacttaattaattatgtgctaatgagccacgccgttttattgtgctaaacggagtagctcattagcacatgattaattaaatattagctaaaactgtgttcatttgaatatattagttctcaaccatcctaaacgaacagcctaagactgttcatttgtgttggttgggaaccttcccttccagcacgaacaacggagaaacacattagcacatgattaattaaaatattatctaaaactaacttgaaaaatagattaatatgatttttttaaacaactttcctatagattttttttttcaaaaaatgcgctaaaccttcctactaggatccgtttaacaatttaaaaagcatgcgcgcgaaaaacgaaaggataaagttgggaacccctacaaacgagcgcagcctaaataggttctataagagcaagtttaacagtatagtcaactatgggtttcagatcatgtatagtcaatttaatagccaatacatacaatagttacctataaacatatattacactattgatgtatggacccacatatcatacacacattgcgtattgtagttcgtgttacagctggctacaaatctgtagcccgttactcttctctctcctcttttatctcctcgaaatgtgtttatagatggcttatagtctgctattatacctgctttaagagcaagtttaatagtagagctaaccaatagcttacgcatattcacatacttcaaaatgaatacattaaatgcataggagaagaaaaatacatgttaactctaatactccctccttactcgtaaaggaggccattttggacagcgaaacggtctctaaaatacaactttgacttcttgtttatataacaatatttattgaaatgtgatatatgtatatttttatgaaagtatttttcaagacaaatctattcatctaatttttacattttcaaactcaacaacttgagagttattcatgatttatattcctaaggtttgacttaaatattatcttaaacgacctcctttactagtacggagggagtataagctataagcttatagttggctctactcttaaccttctttatttttcaaattttctcttcttcacatggcttatagcctactaataaactttctcaatgagttcagatttcagattcctgcaccattaataaccgtgagctgatggtgtcaattgctgtcttgctgagcactctcctggcagtatgcttgcatagacaagatcagtaatcaaaagcagcagtagctaactgcttcgaagtaccgcttgggtaaaccataaacaacaggccatttatacttgacattgcacaggccgatgagaaaaaaacttccaccacggaccacggttgatatacatcaagaaaatctacactcagattattctaacgaatcgtataatgtcagggagcacacagttccactatatcagaccggatgatcgttacatttgttatggagcagtaaaaagaaacacaggtacagaaggtatctacaaggttgatgatgaggggaggtgaaactaatttgaccagacatgcaccaggcctttgctgtttccagtgtagatttcgttgcggtcctcgtcgtagaatagtgcggtgatgtcctcaagagcatcagaaacagtgctccgaatggtagatctgctgctgtcacctctttttcgaggagcaattgtgagagtagggtcgaggggggagatcttggcgacgcactttcccgtgaagatgttgctcatgttgattgatcccgtggggggagctgagtaggcaacttgccaatttattcatatgaattcaaaaacaaaaaaaaaacagaataatgaaatttgaaattacctatgccctcgcagccgccactatctctgacctcctttgaagctttgcagtatgagataatcaagtcctggtcggcagtgatgtatatattattggtattgcagttagaatgccacaactcatgatcatcaaatgaagtaactagctctccacggaaattccatgctgcaactgtcctattgcagaatgtcaggaatagattattttcgtagaggaagatgaatgccgaaggagtcatgaattcggttttgttgacctcaatcaagttggagtttctaacctggtcagagaaccaagttagttcaagggcaaagtacaaactgcagttgccacaaacaaagaacataagtaacgtacatcaataatctgtaggttttccttgtcttgtttcacaagaagtttttcattaaactgctcgatgaagtcaacctttctgctccgatgaagcaactgggtgaaggttttcagtggggttccatcctcaattgagagtatctttaatggaacatgattagctgacttctgataaattacgagcatgattccaggactggagagagaggtttcatgaatgtaagaaaatgtcaaatcaaagatgaaaacttatttttttatgtaatcagtcatcagtgataaccgaaccttattttgatttcctggatgttcttatcacatatagaatacagaaagttgtagttcttcagatcaaaaactttgtaagtgctgcaaaggagaaacaattacactatgcacataccactgctgtcaaactgtaaagtaaaatgttacatacctatcctgggctgaaaaagtcagtactttgccattaacatcatcaaactcaacaaatccagggtatttcagtgattccgtttcaaataaaggaaacccatcattcaattggcctcttctaatgtacctaaaaagaagttatgataagagaaaatatgttgatgctttaaaatgagctagcaaacagatcgaggcatgaacttgtgagttgtgacaagcccaattatcactttctaaataaacataatgagagcaaagaaccagcatcttgctctgcagacaccaggaagctcaactgtttagcaccaaagatactcttttcatacacagaataattcaagaagaaataaataaggcttcttactctattggagttgttctgcacttgagcgagctgaaacgatctgattcataaactgaaacggtgataagggattcattgtttttattataaaacaaactcctaatcacttcatcaggacttatattcaagtagcatatgcgcttgtttgttgctgccaacatgagaagaagttttgttaggaacataaatctgacaaaagcaaaaccagttagcattgaagaatgagatttaccccgattaaatgcaccgcatagtccagattgggcaagtgcaaatatgacatcctttgctgcaacaatctcaataattttggttctgctccacaaaaatggcagctgaacaagaaaatggacttcatcatcataggtgtcatactcttcctgcacaatcaaattaaattcataaattagtaaacaataatttaaatattaaaatatctgaattgcaaagtagtcagttaagggaaattctgtgcatgaaagttagttgatcagatttagcaggtacgattatagaaatgtgagatcaggcgtgtccattgatcaatcctggagttttcttgccctccccttccttgtccaaatctacttattagccacttcctgatacctcagtggcgtttacatcaatgtcttctctgtttatccaacatatttggcacaatatggaacattttcacacatatatgcacacaagacaacaaaaaaggcattaaagactaaaaataaattataggaaggtcattatccagctcatgtccagactgtacatggagccgatcatgcaaatttaattggattgcacagaaagttttactactaaccttttttggaatgtagccgagttacttagatcctattatgtcaggtggacccactggtttgtcagggccaatatggtaggcattatcttcaaagaataaattggcttccataaacatttcaatgatccatgtttgttcagtacttttaatgtacagacaacagagtcagagtgatttaatgtttttaagattttactatggctgcggaggcaaaacccccataatacaatcatacatggtgccacaatagcagctacatatgtcttcttccatgtcattagcatatagcattggtcttgcacatgtcctcttcccacttgaaaatttccatattagaggcttccagtggcaaacatacaagcaaccaaaatccacaaatatcttttctttttcagctaccttcaccatattaccaaacaacactaattttaaagataccgcaaaaccgtcactactctgatatcactcggtttcttttccatgagcttcaactcaaccgattaggtatgtatgaaaggaattgtatgatatgttactgttactactcacttatatgtggattctggtaagcactcgcccataaatgtgatacagtggttgttttagttaaaacaatttctttaagccatcagaaaacagtggcattactaaagcaaaataactggcaacacccaaagaaaaggtcagttaaatgcgacggaggacgaaggtacctagaaaatgtggaatcatgaaagccttccgcctacaaattcctatcttacccatccagcttatggtttgccatatttaattaacattttattagcctagctggctagattcgcaaaagataaacaacacgtggccacgtgggaaatttttgcacgaaaagttagaatttgattcgcattgggtacgtaatgttttactgttgagagaacagaaagagtgaagagaagtataaaataataagcatgtattttaaaatctgtatagtatatgcatctcatgatgcctgaaatacaaatggtgtcatgctaattacagtttattcagctcatgcatcaactaatttcaaccccattcagatttcaaattttcaatagcattgaaccactgattcacaagttatgcaaatatgctatgaataatcaatagccttattttttttcagttatgcaaatatgctataaataatcaacaaccttattttttttaaaaaaaaaaaactaagtctgttggttatgcacactccatatatcaaactagaacatgcaaaactacgtgcaggacatcataagcatttgcagttgatattcctagcactgaattactagatctagccatggcaacacaccggtgcaatgttataacattgccagttcactaaccagattaccactattgtagcaatatacttgtgtctccacaggcaacactttctggttaaatttgatcgcatcgaatggattgccacctaaagttttaaaaaaaagatccctaactatatcaagtgtcacggatcagaatgaattaccaagcggcactaggttaatcacgactactggaaacctaggagcgaggagacgggcaagctgcacatacctgcagctggaaattccggaatttctcggggcaggagaaggcggaggaggagggcgccgcgggccgcggcggccggcggtgccccccgccgatctcgcggcgcgcgaccttgtggacggagtcggacgggtcgcggcgcggcggcttgcggcaggcgggctgcaggcccgcggacagccacgcgcgtcgccgcgcggcggtgatgcggaggcgcacccgcagcccgggcttgtggtggtggtgctccatggcctgcctccgccggcgaggcgggagcgaggggcgcgggcacggggacagccgggggaccgaggaggtgtaggggaggggggcggggactacgcggggttagggtttagaggaggcgccatggatggggaggggaggggaggggacgcgggaatctggaggctagcgactagcgaggaagaatgggggggagctggcagtggcactaggggcgtacggaattgcgaaggggaaaccgacagcggctacacgctactcgtacagatgaacccggttcacaattccaatggaatccgattcggacctcgtgaaatccgaacttttttgaatcgggccatcgaagacacgaccgattcctgaatttcaacaaaatttatttgtattttattggtttttatcggtttatcaatggattccgtgaagtccgatgataccgtttatgagcggattttgatacagtatcaagatggactatgggcccctcatagcaattttaatggtacccagcagatatcacgaataatagtgacattttctcaaatcggtaattttgcaatggtatgatccaattaacctttgaatcatagggccaaatagaaaaggtttgaataaaaattggatcttatgaaattccttataaatcattaaatttacccgctttcttaatactcgtatccaagcctaaaactctctaagatatcttaggatggagacaatatcatataagattgtgattacgaaaactcttagcaatagcatgaaaaacatatactccatctttttttaagtagataacgttattgccttttgaacacatgtttaaccgttcgttttatttaaaaattttatgtaaacgtatgagatataaattatacttaaaatactttgagtaataaaataactcacataaaaatatataattacataattttttaataagatgaattatcaaacatgtgtttaaaagtcaacggagtcatctattaaaaaatatgatagtagtagatttttatgaaaagagcgcccataatctcttctttctataaagctgctaatgctcactgaacacctaaagctcaacatgcaagcatagtatttactagcattcctaaaacctacatgtaagtataccatatcaacccattaagcccacaaatctcaacatgcagacatataataattatagctacaaatttacttcactctaaaactaaacatatacatgctaaatcatcattcttaaattattttcataatatttcaatccaaatcatttctcatttatctattgtttaacatatatcccgcagcaaagtgtagggcatcatcttattaataacacgtgtaagcacattgcgtggcaaggcattgtgatcaatgtcaagtcattatcgtgtgtgccccgtaaaccggttgataagtaagaaacgagaaatttgtcactcaaaaagttttttttttgttttatgctactatagtaatgttatgcatttgcttttgttgtccccgtgccgacattgctgtccttttgcatatgagtatacctacgtaatcagttgatcgatatcacatagttattataatataagctttggattcgaaggtaatcaactgtttattatattttgtactcttgtcgattttcagtatatccacttagaatccacgtgcttaatttgcatatatagaaaagaaaaaggctatacgtactaattttttcttactaaattcttactaacactgatgtgtcatgctatgagtacatctagattttttataacttccatctatttaatcaaacggttgagatgattgttagtaaatgtttagtaagaaaaatttagtacgtgtagcattgctctatagaaaatatgctagcaaagtgtaaaatagtgggaaaactcaaatcatcccttaaggggatatccccttatttttatatgtcacttaaaaagtaattaaaaaatttagtaggatagatcaatatgtgatatgtcgcttcacaaacatgcaaattcaaattcaacttatacaagtagaaataaaaataacaaatttaattatgaatagaacacgtaattcacagtcatatttgttatttttgtttcgaattgtataagttaaattttaactcgcatgtttgtgaaaagatatatcacatattaatctatcttgtgaaaatatatatcatatattgatctatcttgatattatttaaaaaaagtataacttttgaactacatgtacaaaacgaggggatatctccacgagggacaaaaatctacttccaaaatagtgtgcatctgttgaatgtgtgtatgcatgttaggttagtagtacaggttcctgctccaacacattactatacccagaacatgtcgagatagatagagcttttgaaccccacaatgcagaatgcagaagcaggtggggcgaagaggaatccgagagatcgggagcacaccggtgcaacaaggtatattggcatattgttttcctatagaacaaagcatttctgactctgaagataacttgacccccaataaggtctcttctcttgtcatacatgttcggagtactatactagactctgaagataacttgaccctcataaggtctcttctcttgtcatacatgttcggagtactatactacgggtgagtgtgtttagttcacgctaaaattagaagtttgattgaaattgaaacgatgtgacggaaaagttggaagtttgtgtgtgtagaaaagttttgatgtgatagaaaagttagaagtttgaagaaaaattatggaactaaacacggcctactataggtgatttgcttccaaccatgcgtccatggcactccattctcgtgacaaacacagcagcttaattggaggagccagaggctatacagactcagtgcagatcgagcagaggcgagaagcagagggtgtattcctacccggggccggcctgttggagatcagagcacaggagcaaaaattcctcatctgaatattcagacagacttacagttacctctgcatcggatgctcctatacctatccaactcaggtcagggatattaaatgctcatcagagagagatcaggcacagcgagagaagatgctatacgctgaactgaatttcttccctgttcttggtgatcgtttcgtcacctgtgattttcattctcttggacaaagcgcacccggggcgagagcagaagaaacggatctctgtctttctgacgacgggtgtgtcgatcctggattggcagcggcaaatgacagggtacagtacatgcctaggtttcgcacgttaccatgtccatgttactctcgcgaaacaggagtaccaagcaatgcaggtgtgcatagatgcgtggtgtttgtgacctctcgttgtataactacattctctaacactgactaatcacaatgcatacgtcagatgaagcgtgcgtagctcaactgattaagttccttattgctcgtatttatagctaactattcttttaatggtaggctacgttccaaattattctttcagtggtagcgagactccaatggtaacttcgtcaattttaagatatgccgacccaatctttcgaatgtgctcacagaggtaaggtatgcgtgtgtgcgtttataaagatgagtgtgtgtgtgcgttgtgggtgcttgtgtctgttctgtatttataaaaaaacaatgcatagatcggtttagccttaagacatgaaaaaaaagaacacgtttaaatccttgcgaaaaaaaaaaaccgtgccaaactgcacgaagctggcggcggcccgaatacgccgtgcggagaaggcgtcatgcgcgcggacggacgatggctacaaggtggattacctaagcataagcagcgttggacctaacccgctcgccggcctgacccagacccgcccaaccgtccccaccgcccgcccgcggcctccccaaatatccactcccaccgcgcgcgccacctgtacaagagaaaaaaaaaaaacgaaccaaacccacccgtcgtcgccgctccgcccgcgcgtgtgcgtgcgcccacgaccgcgcgcgacgcgacgcgccggcctcgtcaatcccatcgatcgatctcgccgtcgccggcatcgtcgcgatcatgccgctagatggtggggaggtggacctgtgggcgatggcggcggagctggagcggcagttcgccgggtacaagcagcggcgggcggagaggagcggcgcgccccgcggcgacgacgatggcgccgatgcccgcggtggcggcggggaggaggaggaggaggaggagggggacggagacggcggcgacgtgagggggaggaggtacgaggcgtacacgaggcggagggacgagcggctgcgggaacgggaagggtggcgcgcgcgcatggagcgcaaggaggccgaggtcagggcgctctgggcgcagctcgagcgtcgcgccgccggctgtgccaccgccaccgccacggcgacggacgacgacggcggcggcgcggccggagtccgagaggtaggtaattccgttgccaaaaaggtcgttttctgcttgcggtcgccggcacgacacgttccgtctctttgttgcaacttaacaagcgcgggtcgtttttaacgggtctcaagttgctaagttgcttctagccttctaggatatgattgattgacccaaatagtttggacgttgcgtttctgcaatctgcatgccattccatgattgatgaatccttctatctttcgctgaaaaaaaaaatccctagatcgatgcttcctgtgcatgcaagtatgcaactgcattctctttgatcaatccccctctcacgttttcgttctgaaattttttcttgagagagtcaaaactaattcgttctagttttaaattacgtgttatagcctataccctccctcctaaaaaaattattgtactacgaaaccggatatgccaagatttgattcatggcacatacttcatccgtcctaaaaggctaaaataagctaactatgtgttgtttagtaaatctaataactaatggtcatctttagactgcagaattctttatagtatttcgtagcgctttcgcgaaaaagaatagtgtttcgtagaggtcagttcaattttcagaagattaattatttcaccattcgaaacgggacctaaagtggtaaaatttttagtacggcacaagggttcacgtgaaacgataaatggtgggttcacgaccaaatccttgttcagcactttctgctgcagcacatatctctgccaaggagttaactcccggtcccgggaagaaactgcatgcgcaggcagcaagcaaggcagcatcaacactccgtgtgtcaataaatcgtacgtgtattcctgatgatatctctcatctcaagtctgcgagtccttccctgtgaatgcgtgcgctcccgtgcaaacgcatgcttcgtcaactgctcgactcatcgtccgtaaaagagaaaaaaaattggaaccgtgcttgactgcgtgagcatggacttgtttctctttttttttataaaaaaatatatatattcatgtcgaacttgtcgaaagagattgtttttacaccgtccaaaatgagagttacttgttggactattgggtttataaaatatatatattgctgtcgcatcggtcaactattaggtttcgctgtcaattgtatctgccctagcttacacgttgccacgtgaaacattccctacgtggtggtgctctgtgtgcatatgagttttctgtataattgtaaaaaataaattatgtgtgtatgtgtttttcgtgtaatcgtaatttttttatatatttgatacttatgttttttaatatatgatgtctttaactttttaaaatctgtttgatcattcatcatattcaaaacaatttatgtaactattatttatttattgtcaaatgttttttaaaatacgatttaaattttttatatttaaaaaaatgaataagataaactgtaatacggttatgaaaaagttacagcgtcgtatattaaaaaaacatttaaataatacattcggttgttgtttaatcgggtgtggtggcgtgtactacagaaagctgggaaagacggcgagaagaggagaagatccgacgtggctgctccggcgagtaggatctccggcaagaagcacgcacgcaccaggagcttctcgtccaccgccacgaagagcagcctccccgacgccggggcgcggcgagcgctgtcgcaggagccgccgccgccgccgacgtcagagcgacccaccacggcgggcgccggcagccatcgagtagcgcgggtcaccggcggcggagcgacgacgaccgcgccgaaacccagggtgttctcagggcacaggagctcgacggcgaaagagcatggctcatcatctgccaagggtgggacgacgaagccgaagccgccgcgctccctgccccggcggtcgagttccggcgggttggagaatctcaaggaggcggttctgtcgaacacctgtgccgcggttgcaccggcgcagagctgttcgaccgagcaggctactgtccatggcgaaaccgggaatgcttctcccccgtcaccgttcgctggcgcggcggcagcgaatgcccgcgccgcctcgccggattcagactgcggcgaggcagtggacggtggatcatacgaccgtgaagccgaggcgaagcgtgtcggcgagcacgacgccgaggaggtcacggtgtctccccagaagctggcgaatggagagatcaccagtgactcggacaccgagccgagctatgtctacgtcaagaaggacgacgtcgagggggaggaggatgccatggcgaggcgttctgaagctttggctgtctcagatgccaaacctgcagagctggaggtggagaagaataacagcgacgccgccgcgcgcggcgaggagaccacggctccaccgtcggacgccgtcgcggcagagagcgcgacgacgatcgtcgcggaagaggcaccggcgagggagagctccgacgagtcctcctcctcctcctcctcctccttctccggcatcaggtcagggcgcggctcccctcccagcagcgcgccagcttcctacatctcgcgagctccgtccatcgagaggctgctcgaggaggacgccgcgctgctgcgcaagaagcggcagcagagcgccgacaagctcgccctgatggcgatgacgacgacgacgatgtccaccccgccggccagggtctccggcgcggcgcggtcgcgaggattcaagagcttcttgagcttcgggaagaagaacagacgaggcaaggatgtcaccgtcatcgactgcacctcgccgtcggtgccctcggtggccgacgacgacagcggcagcggagggtggccgtccggtgagacgatcaagccaaggatggcctcctcggacgctgcctccgacgacatggaccatggctatgccattgccgcctctccacagggtaatcaaatttcatgttcttccatagagtacatgacaattagtaattactagtacatgatatgttgtggtagatttctgatgcttgttaatgtgaattttcaaacgcattttgcatgttttaactctgcaggttgctctttgcaaagccttgtggttgcatctcctgcaaagtctgaactgcatgagatagacccacaggagaaatcaccaaaaggtgaaaaaaaatgttttgattttgttgtgtgttttgcagatcattcttgtttctttctgcctctgtactaatgttgtctgtttttttttggtcacagctcatcggtcgttcttctcgtttcgatcattcaactgtggcaggagctgatctgaagaactgggaatagacagttattactactgtaaatatagaccagtgtggaaattaggtcgctgcctgaaatattcagaaatcagaaacccttgcatcatcttgattcaaatttcaaagaggtgaaatgttgttatctgaatactattccttgatacagtaaggatattccatagaccaatcaggatgcaagaagagcagatttggagatacttctgtacgtatgatggcgtgtttatgttttcttctgatgttcttatcttaacagtctatgttttggcaactacctgtttgcatactgtaccatgaaaatgagaactgtccatccacaatatatatgtcgtgaactggttagttggaaattagcactcgtgcatgtttcagaacattcactttgttagcgaaatttcagaatatatatttgtgatttttagctttggttaattaaatgtgatgaaggtcattccaaacatgagtaaaaagctgaacatgctttcccctagtgatgtatgctctctacttataatttgtatatgtagctcttttctctacaaattgacattcagatcaaaacattgtaacaaacatgcatgctaggaacagtactcatttgtgcacttccgctgggagagacggctaggattatcagtttatcaccaaatatagtgcatctaataagacactatatgaagtagtaaattaaacatacttcttatcattcgttgccttctgatcgtacatgtgtgttttgttggaggtaaatctgcttgtacatgtgtagaagcatctcatggtttctgccgtataggaaccgtctatatactcactggaacggaatattagttaataccatgctatcatccatgaccaatattctcaagaacactattgtgtgatttaactaagacagttagctacctcttactggaacagcatattagcactgagaagaacatacctgagctttccatgcgtgtaggaccaaccaacatcaaacactgttggcttccctcacctgcatctttgctttctctctctgaaagtctttgtcactttgtcatgcttaacgaggacagtatgaaaatcagtagctagctctctgcaagttccttttttcttgttcaggaacatgcatctaagttctaggtcttgctttgctcacagtgatacccaccttgtctgtccataagcatactttgcttacatataactacatgctattaatagatgctactgtacaaactttgaggaaaagtataactttcgatggaactaactcgatctatccattggtggagaaaggaattaactttgacaggagaaattaaaaagtccatatatataccatttggtcaaaatcaggtgatccatttcagatgtgtctctgaaccttcctatgggctcagctagctaattaacacaccatattaatgaccaaattaactcgtcagtatcctgtttacctcaaaagttttcaggcaaatttccacgagtttccatgactttctagcgacaaattggctcaaaggtcaagaattcgatcaccttgtaggacctcgtttctgactaactcgtcagctagaccagctagctagcttaggtatcagctgcattcataagatccaatcaagaaaacataaacaacacttagaacacttctacttacaatgcatcggcgaatttcgatggccgatccatccatccatccatggacgtgctacttagctcgatcgatcacgagctcaagcccccactctaatggcggcgccgccgcggcgatcgacggggcgagaagccatgctggagaaggagcgcacatgctgcaagccggccggccagccagccccgccgtcgagcacgtgccctgcttctccagcacggtttgctcacccctccttcttcagttcttctcctagggctagagctagctaggccctagcctctctctcgccattggaggaggagaggagagctgggagaggtagaggaattgcatggtgatggctgcaacttgcaagcgatgtggcgtatatataggcgggcaaaagcatagtacatgtggtaggaagacatggttgtctaaaaagacctaactttctctgtgaaagggagcccaaacctgcctctcgaaattaaagttttcttctttttcatcgatcaaaggcagaccaccaaacctcggatccccatccatccatccaatccaattaatccgagttcatcagttaatcaacctaaaaacccagagttcagttcatcagttaataattaatccgagatgaaatctctgtctgtgtgacttgtgttagtcgctgtcagaggtgaatttaattagagggatcattcgagtttaacttttgacaaaaagccgctttgattacctggagatgatggcagcgtcaaggctagtttaaccgcccgtcggcccggcccttggacggcgaccgtaaacgattgtatgactctgatcaagcgatcgagatgaaagcctgcagcaactgggggttttgttaatggttagccacatgttttaacctaatcttggccgactaaactagtctttcctcacttatgtgtagttcttatctttatggtgataattaaccatttgaacactgctgatcaagtagaaactaaattaactatttgaacagctgatcaagtaggctatacaatctcagaaggagagacgacgacgagttgcggacaaaaagttgagagcccagtgcctggctatcatatcaccactaaacaaatgcacgcgcggcaactgatgtgatgtcagtgctcaaacgcagaactttttaatttgtaaataccatttttgtatgccaatttagggcgtatagaactatataaatatgcaatttacgcgacaatttggcgtgtatgtggttggggattggcatctaatcggcaacgcggggtgtcgtcagatgcagacagtgcagtcgcggacagagttgagagccggtggcatcagcgagagtgatgtgtttttgtggctaaacaaatgcacgcgcgctcgctgttgtcgggtggacatgggcgctgatgctgataagtaaatcgataatccgtgtgtgcccagttgcgaatttgatagaattttgattggattggtttaggcagagggtcaatgcatgcgtgcgtacctagctccatgggtggtttactcctgtctgccatgctgagattgctgatgcagcagctttaatttgcgttttggtgcagatgcagagctgcagatagcctactcctgttggaaagaagcttggagagagaatgtttggcaggaagaggaatgttgtgtggctactgtccccaacaaccatgaggttcttcagtgtaataactgtttctttgtgcttcgttgggaggaccattttgcttttacttgggagaagatggcattttttttctgtaacagtgtgtgaatatattaccattagggtttcaagttggttaggacattctggtttgggatggtagacctcagcatttcattttccttgacctacctcgtactatcagtctctttgaccggataagcataacttaagtcttaagacatgcgctgtagctagtttaagactcactgttgtaatttctagtcatttttcttcctctcggtcctcatccattgattctattcgtatcttaagaagtctttaaaatcactttgacccttaaatgatctcaatttaaaacgagctttcgactttctctttcagtttttcttagaaccttctcattctagaagtattttttttcacgaacgcgtaaaaggattgcacgtcaatatattagaagaaaatagttatagttacacgacgcaatcagccagactggcttatgcaaatagaagggaaaaaaacaaaataagaagctgaagcttttaaaaaaactacattctagaagcattttttgatttgttctaagcatgtaaccttttttttttcacccttcttagaaacttctttttatttatttgtttatttttcttgtttgtactaaacacaccactttatattggacactccaggctaccaaagttgaaagttgttaccaccagagccaatgagtcccatcttcctcaccgaagactcttgtttgggaagacatgcaatcctttttcaattttttgtggaacaaacaccaatcttctgctctgcatttcttttttgagatacagggaataagacaatagacatggaactattttagcacgtccattcgaagtgttaattcatttcaacttacaaggctataacctccgtcccaaaaaaagtttatttgtgggtttctgtgtacaacgtttgaccctccgtattatttaaaaaatataaaaaactttaaaaaaagtcacacataaggtactattcatgttttatcatttaataacaacaaaaattactaatcataaaaagcatttaattaagacggacggtcaaacgttggacccagaaacccacaaatgaacttattttaggacggaataagttcatctgaggtcccttaacctatcaacgaatctgattttcgtccttcaaccgaaaaacccagatacaacgggtcccttaactgtcaaaactggtgcaatataaatttcatggtggtttgtacgacggttttcgctgacgtggcgcttacgtggctaatttgactcagttttcatatgacgtggcagttacgtggcgcttacgcgacaatttgatttggaaaataataaaatttgtgaccccacatgtcagttacacaaaaaaataatttaaaaatgatgggcccacgtgagccccacgtatcattatcacccctcctcttctacctcctctctcagatgaacttattcctacagagggtgtaagcgattgtagagcccaatctaggcctcgtaaggcccattacgttatacagatccgtatctaggcccatccaagacattttgaacaaggaatacacagcccattaatgatacagaaatggcccgttagtgggtcgggcccaccaacacattgcaaaaagtgcaaaaccactcaacccgtgtgcgactcccacgcctcgccaaaaaccctaacgcattcgcctccccgcctccccgccaccggccacctcccgccgcccgccatggccgacgtcgacacgggcgagctcccccagacgccgcgctcggcgaccggagacgacgagctctccctcatggacggggagcccgacctggccgcggccgtcctggcgcggctcggcgggtcgccgcgggaggacgaccagcacctctgcgccaccgccgccgccatggcgcaggccgtgagggaccagggcgtcgccgccacccccgtcgcgtacttcgccgcggcggccgcggcgctcgcgcccctggcccgcgcgggggccggggccgcggaccggcacgtctccggcgcgctcctcgcgttcctctcggccgcggtgcccgcgctgcctccagccgtggcgcgcgcccgggggcgtgaggtcgcggacgacgtggtgcgggtgctcgagttcccttcgacgcctgactccggtgtgagggctggggtaaggtgcctcgcgcacttgatctcggctggggagaaggcgaactgggaggcagtggagccgctctatggggtggtgctacgtctagcagttgatccccggcctaaggtactagcaaaataccaattctctcaactatgttgctgtcaaaattattacttatgcgggtaaatatgcactgctgtgtaacttgttgtgatatactgataaggtttactgggcatccaatgctgtttcagttaatctgatttaggatgcagaataccgtttagtttaatgggaaattctagacttcataattttagagtcatactccctcatagtaaaataatataactaaactcatttctcccgatgtcaaataaatttgactggagagagtaataatcgaagaaggatactgcacacattgtattcttggctcagcagattttgttcatgttgttagctttactcgtatcaaaattcaattgctctgtatcatgctgaaaaatcattcatagtttgctttgatggggctgtaggtgaggaagcagtctcattcatgcttgcgagatattctgctcagtttccagaggcaagctgttttggtccctgcgagtgaaggaataacgagatgttttgagcgttttctactgcttgctggtggatccaatgctgtaaacacagatgtagcagaaggcggacctaagggggctaaggaagtcttgtatattctgaatgctttaaaatgctgcctccctcttatgtcatcaaaaccttccaataccatcataaaatattttaaagctctgttggatctgcaccaaccaatcttgacacggagcatattggagattctgcatgctgttggcgacagtccaactgtacagcttaaatctgacgtgctactggatatagtatgctctttggggctatctgtctctgttgaaagaaaatcaggggatgaaatggcttcaattgcaaggcttctaaatgttgctactagaaaaatttataatcagaataagaacatatgtgttgtaaagcttccactagtatttacttcacttggaggttggttcttctcacaaaacttggcacctttaagttgatcaattatacctagtaagtcatattatgtcttttgtgtaaaagtcttgttgtaaattgttcgccagatatattggcaagtgaatttgaagaagcaagattttctgctgtggaggctttcaaaagtttaatagaagactgcatcgatgaaagcatgatcttacagggaattacccagattaagtctagacatccagggataagatctgatcccacaaccatagagaagatatgtgctatcctagagggcttgctaaatgtccggtacggtgatgtctgggacaaatcatttcatgtgatttcaatggcatttgacaaattgggtaagtataccactacgttagcatatcctcatcattcaatagcttaggaataatatgagagtctctattttagtaatctggctcctctggtcagagcattaagattcaatgtagcttcttgttcacatcttttgtgttggactctctttcttgagccattaacaacctttatccaaaggtgtttttgttaaattgaattatgctattggtaattagttgcttgattatttgtgataattgttcctgtactgatctctaatgcaaaactacaggagaatcgtcagctgaccttttgcctgaagcacttaagaacttggcagacatgcaaaacttgtcagacgatgacttctctttccggaagcaggtaacttttcccatagaaaaagcaccattgtccttcagcataatataaacaaatttatacctttcatgcaactaactttgtttactccatgtatgtttggttatctcctggcttaccttcatatgcatttatttgcagcttgattcatgtcttggttcagctgttgctgctatgggaccaaagaacgttcttaaaatcctgcagattcattcaatatctgatgaaaatgaatggatcttccccattttagaaaagcacattgttggtgccagtttacaatttttcttaacagatattcgggacattattagagctgtagagaagaacattccaaaggtatcgtccattttttttgaaaatcctaatagttttaaagcaaaaacagattaagcactttcattttaaactgcactgactgtttccaacatcttcaattgaacagcttttaaaggaagataagcttttctccgccaagagagcagaaggttatgtgtattcactatggtctttgttaccatcgtgctgcaattatgcacgtgatacctcaatccactttagagctctgcagaatgttttgtgcgacacgcttaaaaaccagcttgacttgcgtggtatcatttgttctagtattcaggtatttcacactgcatctggttagttctatattgcaagtacttctgtttaagttatgcttttgagcttatttttctttttttttggcttgtatattttaggttttgattaaacaaaacaaggaagcattgtcagttcctgttgaagaggccatacttgctgaggatgaaataagcaaatctgaaagaagagcaaaagaacgctatacgaaagagtttgcagaggaaaacttaaaagcaatacgggctttctcttcaaagtttttggaagttctatgttctatattcttagcttcttcaaatgatgctattggacttctacaggtatattgttgatgccttctatattgtgccatctgcttgctgggctctaaggatctgtactttcgggaattgtttgatttggctctggaagttgatttcttctatgatcagccgacaggtcaaaatttgaaatgtttgataataatctaatgacttcatccgaatagatcacagtggggaactttgaacctttgggtgttaattgttgttgaggattaataattggattgttttgttgattgtttttatatcatgtacaagcataaatgtgacttgttccttctttattgaacagcctgcaataagtgatatagcttccatatcagagaaagacactgttggcaggttctttcttgatgcaataaggaagttgttggatgccacaaaagctgttaatgcagaacaaaagaatgatagttcaatgcaaatcgaagctaattccaacacaaataacatggcaaggtctgcgcaaaatttatattcttgttacttcttattcatgtctagattccagttgaagccgattgttaatttcaatccttgatggatcgtagggctctcctgttggactttgcagcttcattaatgcctggtttagctgcaaaatcgatcaatgtgctattcagttatgtaaaacctgcaattaaggtacatatatgatatattgcaagtatccaagctgttctttttttttaaaaaaaattgtaagttgtgttgtacctgatattttttctcacgctcgtaggatactgactcattgattcaaaagagagcatacaaggtcctttcaatgctgctcaaggtatgtctccgttttcagtttgcactttatgtgaatcatcatggcagatcacagagagataacttgaaatctttatgaatgtttatcatttcaggatactgagtttattgagcggaatttggataccttgttgggcttgatgatttcttctttgccatgccaatttccatcaaagcgctacaggcttgaatgcctgcatcaccttattgtttacattttgaaggttggtagtgaaaaaacatgttatacttgctaggcagatgtggatactgtccctcggattgtaacaggaaccctctgttctctacatctgcaggattcatctaagcttggaaagagggaaattattggttcattcctgactgaaatacttcttgccttaaaggaggtaattgattgtatatttttctgatcctttaatgtagataggaagctaaaatgtatactgccgacagcacactcctaatttgactcttgtgtgttattccctttgaaacgttactgtagcattttgattatttcctgtggtaagtggtaatgtgcagctgtccttacattttctggaagcagaagtatatctactcaagtaactttttatgttctgaattatagacttggatgtattgaattattgttgtgtgccacaataatgacaatatcatgcaagtttcagaccgtcagttctacggcatagttctggtttaagttgtgtgattttttttggatagctagattagacagattctgaaagtatgtgtatggtacataaatgccagctgcgagatgaacaatcatgacttgatgtgtcttcacaggctaacaagaagacaagaaacagagcttatgatctacttattgaaattggacgtgcttgtgaagatgcagaaaatgacgggaggaaggagaatttgcaccagttctttggcatggtactttatgtcattactgtttttaaatgtcttgacaggaccaaactaatgaaatatgaggctctgagccataccaacctcgaactgcattacatttgatttatcagtgctacttttatgtttaggttgctggtggtcttgctggtcaaactccatatgcgattagtgcttctgtaactgggttagctcggttaacttatgagttctctgagcttattggagtagcatacaagctcctcccatcaacttttcttctcatgcagaggaacaaccgagagattgtcaaagtacagcacacaacacatttctggtttattagcttatctatcattctcttcacctccttacagtagccctatatttcctattcaggccaacttaggttttatcaaagctttggtggctaaatctaaagccgatgtattgcacgagcatttgaaaggagttgtcgagggtttgctgagctggcaaactgatacaaagaattccttcaaagcgaaggtactggctatttgcttttgatactataaagcaatggcatttctggtggtatttatataaacgctcacaaacaatgatatggttgtttttgtcctgtggaacttttactattctaataactagatatattcatatcaactcatatagacaatatatgacatgggagaaactaaaagagtgaaatatgcatgatatatcacattacatgtaaactgctgctgttttcttggagcttgctattcatctcttatcttattgccagataaagtcactgatggaaattctagtgaaaaaatgtggtttggatgctgtgaaggctgtgatgcctgaagaacatataaaattgctgaccaacattaggaaggtaacttacagtattttttctttgctcttctcttgaagaatagacagttaatgttgtatgattgtatctggtcaatatgctcaacaattccatgcaatgttaaacagattaatgagcgaaaaatgcggaaatctaaatcttctgaggatggggataacatgtcgatgacctcacgagctacaaggtattgtggtgcatttattgttttttttttgttctgagaatttgttgatagttctgatggcgtgaatgtcacatctatttatacaaatttaacttctgttcaactgtcctggtcatgctccctgcagacaaagtagatggaatcacacacagatgttttctgattttggaagtgatgaggatgactccaatggtcccttttctgcccaacatacagttgcttctcgtactggaacaaaagcttcaacacggtatgtgccacaatagggccacacttggtttgtgaggattttaagtgtttctcacaaactgttatttttccaggtcgaccaggaagcgccaagcagataagagcttgctagagaagttcattgatcagtcaactggcgagcccctagatttacttgaccagaaaacagtgcggttggctctcaaatcgacgaaaaagagggctatgcctgatgaagatgatgatgaggtggagatggaccctgaagggcgtatcattgtgcgggaagagcgggagaggcgcaaaaagaagcagcctatctcccgagacgacgaggccgacgacaggagcatggtccgaagccagtccgtcaagaggaggaagacgaccagctccggctgggcctacactggccatgactacaccagcaagaaggccagtggcgatctcaagaagaaagacaagatggatccgtatgcctactggccattagacaggaagcttctgaaccgcaggtcggaccgcaaagcggcggcacgcaagggcatgagcagtgtcatgaaggtgaccaagaagctcgaagggaagagcgccgccagcgcgctcgctgctaagagaacgcaaacaaaaaaccggaagcagaagaagagcaagtaaggagacgaagggacagagagagatagggcaaggaagctttgtatagctgaaccgatggcccttggcagttgggagggaaagttttggacgtgtacagtgcttggtgaggattcggccgtagtagttgtttttgctcgtttcatctcctatctgtcgaagagaaacactaggttccattcttgccaaaaagggagattttttgaggggaaaaagggggaaattttgacacccgtcggtatgacggtaccagattcagattagatttaattttcttgtaagtttttgattgatgactattgaatttgaaatttgttgcttcctgcccgctgacacttcgctgtaatggaagatgagctgtagcgaaatttccgaattccttattcgggcatacgcgctaaaacaatcgcgcgatcgtggagctgtacggggatgaaacgcaaggctacggcgtacttgattttttttcatagaaagtgattttttttcttagaaagtgattttaaaaaaaagacactgtcaattcaactttttttttttaacaagggcaaacttcaactgtaatatttaaaactttaaacttaaaaatggaaacaaaattaacttgaaaacttttaactcaaattttgaaactttcaactcaaattttaaaaactttcaattaaaattctgaaaacttttaactcagagtttaaaaattttcaactacaaattagaacttcaaactgtttttaactaaattatttgtgtttttttaataaaaagctaatgctaagcttcatcattagcactattagtgatgttttgcgcgagggactaggtagggtgcatgcggccacacactaatcatatggagcagtttgaaacaagggttaatttgatccgtgacattacaaatgtgcctattcagataattagtctatttatagccatgtcattcaaatttttacaaaattggaaccatgccattgttgtctcgttttctatcttccctatccgtgcgtagggcccgccccttagattcattttcttcctctttcctcctctcttctatttttttttctttttttcccatctctctccaacactttcccgcctcctccccaccaatccatcccgacccactcctcgccgcccgcagcaacaagccaccgacatcgtactcgaactccgcactgatcaagcgagagagaaggctgccaactttgtcagtggtggcgacaccagcatccaacaccaacattgtcgttagctctagcgcttggagtctgccaacgccactgcctccatgccgactatgtgcctctactggccccgccacgttggaccggccttcctagagctcgccggccagcctccgcatggtcagcggggagaaccagcatcaggaaggcaggaacgggcaaagcaccatggggaggggtagcggcgaaggctacttgttgcatcgttggctagaggacgacggctgagctagagcgctggttactcgagctccatcgcagctgcttgaatcaagtagttatttcacgagaagaaggctctagtggcaacaactcgggtttggggatgaccggtctcatcatggagccggcagcaacaagatccagctccggacggctgtaggcgacgacaatgtgtgaaggggtcgagatggattggtggggaggaggctgagaagtagtggagagagacgggaaaaaagaggaggggaggatggagggataagatgaatttgacgggtggggtccatgtgcatatggggaagaagatagaaaacgtaacggcgatgacgtggttctaattttgtaaaatttgagtagcatgattatgaatagacgaattgtaatgacatttatctgaatatgttaacagtgaaatttggtaagcccaaagttaccattggtttagagtcagtatcggcttcaaagttctagaatcagccgatgggagtcaagtcgccacgatgtcgtgttcttggtggagtcggatcaatcaaaggaagcttatctagaagagttcgagttcaagaaggatgcgacatgacagttatctattaattaggcatagtttgttagtttccttttatctttagaaaagtgtgtttagtgtccgataaggactttatcttttccttttatctttaggttagtttctttcttgtccgacaaggacttgtatcaacccatgggtataaatatgtgcacccggggtctatgtaatctatcttcacgatcaatacaattcggcgcatcgccaccttttaccttttctactttattttatcgcccagtgggacttggcacccgacgtgcggctgcatcgtcttcgatctccggcgaaggggtaagtccaatgttccgtcggcccaggcaattgtatcgtctacatcggcgtcgttcaaggctgcatcagtacattcgacctcttggattgctctggtttggatgatatatttgcctagctatttatcatatgtctctattaatctagtcttagcatatcaatttagctctatcggctgcttctcgctttagggtttctgccggtatcggctaaattgcgttgctagattagattggcctaggcatctaccaccctgaaaatcagtcaacggcttgattgtctagatattgtgtttcttttcatacttagtgctgcatcagttaagtttgatctactaaatcgtgcttagaactataatctctaacctgctttctgactgccaataagggtttcatcggggtttcagccggtgaattatctggacgttgcatcggctcataaggattgcatatacatataagttggatttcgccgatgacaacaaaggtttcactgtttaatctaatcttgtggatttcatgacatcggacctccagccgatttgttatattttattatcagtagccgattgcctttatatcattatatacattggacatatagccgattgcttaaaccctatcgctatcggctggtatcgacatcggctattatcgactatcggctggaactactacatcggcttgtcagccgatcggctgttttgatctactatttacatatcttgtcagttgcatgatcaaactgactggcacgcccgcatctcatcgtatttggacctgcactggagctaagcagatctcccaggccggtgtgttcgatttttttcgtcaacagaataggcatagttgcaatggtacagatcaaattaacccttgaaacaagggattgaagcctactaattcctttgaatcctatggaatgagtacctattggtctctcaacagacgatatgacctatcagtgtgttataaggaacaataccttaggactgattttttttttacaattttcgataaaaaatattgttacttatttaaaaattcacaaatctaggtgatatgtcacatttagaattttgagttttaatctttcttggtaagttccaagttggctagatgcaaaagtttatatatgaaagaacattgataatggtggggtggttttgaataggcatttttgaaaattactacttagcagcggtgtaaatctatccagaggatcatgccagaaacatcgaaacttccggttggtcttctcgatctggacaagagagctgaatggagtttccagtccttaggttcaaaactttcgatcccctagtttcttccaataaagagggtgatagggacaatcttcatggaacaagcaatccaaacacgtagagaatgcaagaacaacaagcaataacagtttggactccggaacttccggcctgaggaaaatcacaaacatagcaatagatgaataaggagacaccaatttttcaccaaatttggcattgcaaatatcctacatctatgttgagggactccaagtagccagttctcgattaatcttaagcctcaccaaatgaccacaaagatcgagcttggtatccactcaaaggtgttccttttccttgttgagatagagtaacgtgttcacaaacctcttgggttgtccacacaccctggatactcgtgggtgatgcctaactagctaggagaacttccaagagtaccaagcttgaagatgatggtcggatgtcaatcctaagtgctcaaactgaacccccaaagaatccactccaatctcactctaatcactcagatgcacttgatccaaggagagcttatgggaataggtctaaaagttctaacaacaacttgctcaaagcaggggtaggtggagttaaatattcacctacccgaagctaaccattactcacaattttgaacttcggaacatccggcttgagggctgagggttccggacaatacttcggttttggaagacatggaggaccgaaacttttcgactcaaactccggaacttctgattagccctctctgctagctagagaactgtggttggaacttccggaacttacgtctggaacttctggtctagcccttggccaaacagagagctctagttgaaggttccgaacccgaactttgaagctttcggcctggccaaacacaaagctcttttctcccaattgtgagtgacatgctttgtgtttctctctaataggttttcatctgagcacaaggacacaaaccccacttgaataggtggtttttcctatgactcaatttcaaaagaaaaacaatgaaatgccttaagccatcccattgttttagttttaatttgtgagggtcatccatttagagcatcatccttagggactaatcaataattgtgcttaacactcaagtagctcattagtcccctaattgtcttgcctttaatattcctagatgcaatttaaatgtaagaaaatctctaatatagatgtgactctcttaaagaaaaagtgactttagagaaagtcacgctttatttaccataatcaataaaacgtgactttctcttaaagaaaaacgtcgtgacatgaaaatgaagtgattattaaggtgaaaagcacgagtgtgacgatgactagctgaccacgcatattgcacaccgccatcttggcaatcttaagttcctagttggttagacgcaaaagcttacatgaaaaggatctctaatagagtagtgaccctcaaactgtaaaacaagtgaatccaacactcttcacttaggggaaaaatagtgtaaccaacactcttcatttgtaaaataagtgaatccaacactcttcacttaggggggaaaaagtgtaaccagcactcttcatttgcggtcggtaacgacgtatgcctgcagtagccactccgttagctgttactgccagcccaccacctcggtatcgtgtatacatgcaacaaacagctactccaaaaatacttatattttaggacggagggagtagctagttagctgtggccatcataagtacaaaccgacgacaagccaggaaagcactgaatactgcatacatggaaaaaaaagagaggaaatattgccactgacatttcaccacaccaaaatttgtgtactgaaacaatactatatatgaatctatatgaatctagatatacatttgttcaggtacataaccaagattgatttcttttggacggagaatcccaaaatgcaaggacttttccttacaaattatttcaaaatttgaaatcctgagataaaactttattcccaacctatcaattacttttaaccttgtttattctctccaccatccattttcttactagtttatttctccacctgccaacttttgtagtactttattgtttcaccttcacctatcaccttttgtatcttgttcttttgctacttctttaatttttacaaaattaacatgattcctaactaacttgtgttataaagtgatggaggatgtttaacatgattcctaatcaacccatatttaacccttcgttaccaaaaaaaaaattactagtaccaaaacttagttttaagactaccaaaattaagcaaattaagcatgcctaggttttaagactgccaaaattaagcaaatcaatctggcgcctaatgcccacattgtactttgttttaaggtaaaagggcaaacaccaacgccgatatgtgcatttgccaactacgtttcgacaccgaaagctttaacggtaaaaaagcatgtttaagacttgctattcctaaaagttggtcacctggagatgttgctgagagtgcaatctacaaacgattaaaggaaaacttcaccactataatctaattacaagggttaagcaggcattcccgcttttgttttgcagcctcccctctgcagatcggcatggccctgcgttctcactgtcctatcaaagcgaaacagaggcagccacgttattttcaaaccacataatataccttctcacatactaagaaactatcgaatcaatcaatcatgataagacacgcagccatgcactactaagtgtatcacacataaattgaaaaaagtgtatcacgcataaattgcaaaaagtgtaccacgcataaattgcagaaagtgtaccacgcataaattgcagaaagtaagtgtaccacgcataaattgcagaaagtgtgtcacgcataaattgaaaaaaaaaggaatttctcactaaatgaatcaatccaaacaaagtaggtgcgattatcagttactagcatttagcattagtttcttttaacagtcaaaacaagacataatgtaactggcataaatagcggacttctgcagaaaggcaccaacctcagagttaggtcatgacactgctcttagcgtaagcacaaatttcttcctccccttgagaaaaaaggataaaacttgagccaggaggtatctgaacaaaaaatgtgttgcacataataatataagataattgccttgtacacagacactagagagtaaatccgagcttctagaggtacttacaagaaatgtttcacctaacgttttgggatgaagggatagctggcttcttctctatttgatcataatggagaacaaagttgtcctgcagaaaaacatacacaattataattcacaaattttcacaaaagtattatgtgatacaactttacattgaccaaacatccaaaccttgcggattgtctcccagttgtttggatcaaagcaaccataagatcctcgttcataatgaggtgttttgaccagaggctcaacatttggaattctggtgagccacacacgcacttctttatggtagaaccatcctcgagtatacctgcggaaaagatggacatataccatggttcaattcaacagttaaaacaaaagtaaaaaaaaaaggtttaatctccatttggtatttggttgtgctgtgctgcacctcaaagtgggtaacacatatttgccgtatgtattaagatattaataaattctaaggaagtaaatgcatatccaatatcaagcctcatgaaacacaaggaaatataataatcaattacatgaataacatgaaagatagctaattgatagattgaaagattcaaagccttaaacatccagaataattcaggatcatggaacatgttctggtgttgtgcaactagtagtcacccatctggattacgaacaagtcctaagcgtaccctttcaaataaataaaatacacaatattacttgtaaaaaattgctgttgatcctaaaccaattggcagtccactagtcccatactaatccaagctggtctaaaccagcctactccatccggtttcaaatttcttgacgttttagatatgatctcacataccaaggagtgtttaattagggtgcctattccctgttatacccatattaaatactgccatatgcttgaattaatcaatatttggatgtatcctagtggttcgaaacaacaaccagatgcaaagcatgcaggttcgaatcctagcgtcgcttcgtttttctcctttttctttccacgcgtggattttctctacaattttgcacgtgcagcacacgctggctggtgtgtttttctcgcttgtgcgggggacacgggagactactcaactttaaatggaatgcatgcataagaggcaaacaattccaaaataacctaataaatcccaaacgtcaacaattaccatactttggatacaaggctagaacgtcaacatttttataccggagggagtatgtcctacacaagcccaacaaaatgcaaaacccacgaatacagatcaatttaagtccatggtctatccaagatgttatattagataatgttggtggacggagggccaagatgtggccaatctagttgtcaccattaacttggtttgcacccatcattaacagaaggattaatgatgcgtaaccagtggaaactatgctacaaataaacatggataagcacgactatgcaaatcaaaaccaacccctagcaacaagatgtaaatgagaagaccggtgaaaccatgtactcacagctcactagcagcacatagctgagcttcatcccttggcatgctgcaaaccaaagaaaaatgataaatctttcataaaaaaacaaactatactcacattatttgttgcaacaaatggactagcctaatagaattgaagtgggacacacttaatggtagatgtacctatagaagatgtaaaacagtgttggcgtctggaatttctgaaaatgtataggctgcaagaggcagaacacaattacaaatatataagtcataacatgaagcaaatacattgagacaataaattctgcctatgtttaagaacaactagtttaggaaattatgatggtcaacatccaataaaagatggcaaatgcacagccagccattacatattaaaaaatagcacacagtgacaggcagcttacttgtagtggtggaggttgctcagcggagtagcaagctggagtatgaaactcaggttctccttttgctggctcgtttgaccatggagagccaaatgtcttgtacagattgtctggtgagttcaagtttaaacccaatgttgtcaaatctattcctaaagcaagagatgataagtcaacatcattcatcctgataactcctagcaatcccatcaagccatatggatcagatggtgtttggcccccctggatggactttagactctgatccctatatgactgggtagctgaagacacctgctgcaatctgaaaggattttgagcctgaggttgctggtattgctggataagttgctcatatgatcccaaactagaagtttgatttggagaatttagtggtcttagtccgatatttgggggaccagcattctgaacctgataatcataattgagattattattacttgcatcaaagggtcaaaacagaaaatttggatacatgccagatcagaaccatgacaaatgtggtagacattgattgttaagagttttaagaatttccaatattacttactgaattagcaccttgctggtgttgctgacgatttggtgggtagttacttcctaagttaaagccaactgatcttgacatctgcgtaaatgtgcaaatttgtcaaaaaaaaaaagcacagaaaagaagttactgaaaattcagaaacagggatgcaccggatattgttgcgcttgcataacaggtacattatcatgaagttgttccttgtgatgcaactccatagcataatctgtagtgttgcctgataattcaaaaggttaatactttgcacaactcagcaaagggcaaagaaaggaatctgttatagtagcgaaatacgcaccaaaagagtaactaaaggaaaagaagtttaaaacatggtaaagaatatccaatgatcatggaataaacacaaggcaagtaacaggtttcgaccatccaaaacacgtgccaagtaataaattcgagacaggaaatagattatggccaaccaaaatacgagacaccgacaaaatataccaagaagccaaccaaacataaaagcggaaggttattttataagatgattcaccagctaagtttagaaacattttcagcacaccaacagacacaataaaacaaagctgtgatgttcagtgcatcacaaagccgaggaattaaaggtgcccatgtactgccaaatcgacagctatggcactaaactcttagcaccaaatatgcatcaagctttttaagtgactttatccgggaacatcccggaattaaatccatgatatccataaaccaaactcaagccacgtactgtaaatattgttatatttagctagcctaaactatctcaattgaccattgcaaatttccggcatgaggaaaatttgcaggtcctaatattctgccaaaaaaaatttaaaatattgttttcagcatcatgaaccttcccaaataagtttcatattttttggattgcctcaaggcttcaatcacagattcgcagttgcctcaaacatgtgactgacaaggaggcacatggtgcaaagataaatttcctagattccgaaacttttgatctatatttggttggcacaggtacctggatcaaaatggcctgcagttagttttactgccatgacagtaataattgtacatttgctgggttcaattggacttgaacatcttgtaatggttcagctgctatactttcattacacattgcctattggtttagttctccgtatgaccatatgaattgtcataaaataacacgatagccatgggtttggctacgctgacaaaaacaatgaatataacaagagggtaccgaaaactgtgtgagttgcgacaagaaaaccacttattatcatcgtcaaaagtaaatcacttggatgttaaaatcatgtatccgacaatatatgctacaagttcatggccagattgaacggcacttgttttggcaatgtaaacagagagacaatgggattgctaggacttctgcacatgtctgcagaccgcaggttgaacaaggaccattttgtccaagcaatgtgtttgcgcattttcatcgtcgatcatcaaaatgatgatctgtggtaatcccaattgctccaatatcataattggagtagccggcatatagtggtggccccattcctatgcttagtcttaaattaaccaaaggtggaaaagccacggcaagtatatgaacagtactaatacgtaataaccactcagtaacttgagaaaaatggtgtcagccttacataaaagatgaaatgttaaagcaaaacagagtttgtaacagagagttgtatgacaggctagcaaaggccagttgaaagtgcactattgtagacaacaaattgtaatagccatggacagtaacactattaaatagatagtgcacaatacaccaacaccaagtataatcaaggcaccctcactgaatcaacagatagttctagaaataatatagctgtaaccacctttgtatccaggtaaagccgggaagtcttcattttgaatgctgaattcctggttttgctgaacaatggtgttaacaccaactccttgcttccgtagggagcctgttatttaaagaaattgtcaaggcatcctcccaattaatgaaaaatatatatgaatcattaccatattgtccttgtggaccacccgcagaactaggtcgaccagtcagctggggaaaatcactcatgtcaaatggagcaccgtcactggcatcatgcagcatccccatagaaccaagggaattatttcctccttgtatttggttctgagataaagaacctccagatgttggatataaactccccatcatgttcagcatttgaggtgatcctgatatcagaaatttaaaaaaaagaagaagaagctgaatgaaaagactcacgggctttcacctcaatagatataagctaatacatgatatacctcttgttaaacagtaaaatattatagatacatgacatcacaaacatataaaatataatgtttctaagtatttactcagcatcatattacttacataaatcatattgtgatgccaaaaaaaataacagttataaaaataagcaatagatattctagcatccgatgcatgcatgccaggaggaggaataccaatatttcctctaactctgacacctatcaaatgatagtactgttggaattttcatttctaatcttaatcctatcaaatgcaaccgactggtgttcttttaggacgcagcgcgacagcagatgctaagattgaccaggttataactttggacgttacaattacattacaaatgtggtaaggaaacatgaaagagattgtaaaacataagctggactgtgttggataaacagtgaaggcaccaattactttcagcagataggttgtggttggagcttttcttcaggtatgactgatttaggtgggaagcttgttaaggtcctaggatttttcttgtttctgatcatgatcccacttaccaaaacttttttgtttgctcactaacagcacaaggatcctacttttagaggataacaaccagcagctacttagcaatattattaacaaatccttcaatacatatcatttgggtatttttgacacttgtttcatatgcccaactttgatgtcaagaaagagaggggtaactctgcagctaaaagcaaattattcagtagatatactcaacaaaaaaatcagcatagccacggtagagcatgtgttaacaaacaatagctgatgttacaaataactacaatagaaaagcagctaagcagccatgaaggcatgacaacataaagagtattcgactctatggagtaacaaactatttatacagtctgttccataatttaccttgctgaagaatgccattcatcatcctgctggatccttggacattcagaccgccactgccaacattgccactcaaattcatgcgtgatgctatgcttggcacagataatccaccagagcttatattccttccaatgttacttccacccacaatatttcctacagaaccagtgatcctaggacccaaatttcccaaagatggagatactgacatcccaggaacagaattacgactaccaccagcacccaggtttgaggataagccttgaatggtaccaccaatattcaggctactactaaatgctggacctccaccaacattcaatcctctactaccgactcctgaatgaccatgagggatctgcaacaaaacagtaacatggtgaggttacacgatcatttcaaccagcaacaatgtaccttagtttccacaagccgtcagcataaacaataaaattgcaatatggatgaaggaagtcattacaacctgggacatgccaactggaaggttgtttgaagcaaatctcccaggcatgctccctccaggctgttgaaccccagaggatggaaggccactcatggcagcattcctctgagaaaacgatccaggcatatttggcatatttaaacttccatgcatgttgtgcaaaccttgaaaaatggcaagaagatttactacatgaatgtagcattgtgcgaacaaactaaccaagctattttactatatgctcaccagagtgatggaaaccccctggaactgatccagattgaccagaaaaggaccctgtaaacggtcttccagttgagtcttgaagatttgatgcagaattgttcaggtttgactgctaggaaaaaatggcaagttgtcaaaacaaagaacaaagcaggtcatatggaattgccattatcttcaaaagcaaataccatgttgggttaagcagcagcataaaagaataaatagtgcccaaccaaacagattatccaccacagatatattagctctgtcccataatataagggattgtggctacgcatttgcatagacaaaagccccttatattatgggacggagggagtagctgataatgcagtgcctgtacatgcatagcttatttaggcaatcaatgctaatattccctgccatcacagttctcatatggaagtgtcaggcttcaaatttcatatgaagcatctcaacacagaaaactcacgtaaggatggcaaagaatggaagaggacagtgccgcagttgtaagaaataaatgtgtgtataaaatataaataaatcaacactatgttataacagaggacaattatcactttatcaggtgataaaagacaaatctattgctcgttatccacgcgaagctgcagcataagcaaactatttgatgaacaaactagtcagagagaaatcaagtaaaaagtttgaaatggaaaatagggatatcaagcgaaagcacaataatcagttgtaaggataagcacgcacattcagcaggcccgacattgtgacagcaacaaaagcaagtcaatattcaacagtaagcagctattccttccaatctgaaacagaaaatgatatgtgtaagtagtttgaacaaaatggatgaatccacagaaggtgctagatcactaaaactatgtagtatgtatgactccaagggtgaccaaacatttatatgtcttttataataataaaccaacgagtaagcacagagagcaagaggggtaaataatcggtataagattgattacaccagtcttccaataacaaacctagaagtaaatcatcacaccataaaacatactagcaaattttaacggtaaaaagtccaattaaggataattaagtcggtgccataacatatgcagattttaacagtaaaacaaggaagttaaacgttatcatccaactctttaacaatttagaaacatgattagcgccatcaaccacgtagtatgaagagtaaactctgaatgcaggaaacgccaatccacaatccttgatatcaaacgagaaagttacaaaatccccactatccacccgattctccctatcagatctgcccccgcaagtagtagcacaccgatctcaaccctccggcctccactccactctcccacaccgaaatgagcaacaaaccaaaatccaatccctacgaacgtccaggaaccctacggcagcaaccgatccgtttccggcctaatccaaggccccaagcgcgcctgggacggatcggatggggtggaattccacggaacgaccagaattgggggcaaatcaagagggttagggttgcctaccgagagagaaagagggagtccgcccgcgcctgcggcacgagcagaggaggaggaggatgagggatcgggcgcccgccggtggattcggcggaggcgggagggaattcggcggcgcgcgagaagatgatccggtgggttcgccgcggcgcgcgtcggcgatggcgcaggggagggtgggaggagaatggagcggaggaagaagaggggtggagttgggctctctgggccgtaagagcgtgatggattgatgggccagatactttttcatgggccttatcaagagggagggagcagtgagcacggagcacggttgttcgtgtttttttttatcatgtttcacaccttatactctcatgtttttcacactcacatttcctaagctattaaataatatttttataaactattctgtaaaaatattgttttaaaaattatattaatttattaatttagtttttatctactatttaattaatcatgagctaatatatcactttacataactgaaagtgtttctaaacccttcgaaagaacacggccttaactcccaaggagattgtgagaaagtttgttttgttttccgcgtgcacgcttctcgaaatattaaacggtatattttttaaaaaaattatatacgaaagttgttttaaaaaatcatattaatctatttttaaagtttaaaatactttatacttaattaatcatgcgctaatggctcacctcattttgcgtatcttctcaatcttctccaaccattttcgtttgagcttagacttcttggctacatgtgccttttaagctttaagtttattggtggaatatatcttaactttacattttaaaaaaagctactcaaacttagtttttagctttaacagtgtaagggtgacctgtggttttaaaaaagtcaaacaaaaagagtgatggtttatttggacttaagcttttttaaatatggcttaaaaagcctaaataaaaaggaccttagctcattgaagactctgtttagaccattatttgtgctattgtatagatagggcagcatactatttgtgctattgtatagattgtttaaagaattgtattaattcagtatgcatatctaaatatactgttatacgtccaatgttctaatgtgtaaatataaaatggaaaacttctatagattggcagttatgtataccattgcatcccttttcaactcttagaaccgtgatcaccccacccctattgttctgtttatcatagaagcttcgtcaatcattgatttccccaacatgacttcttcagttcttgaaattgaacagcaagacagataggtactgagaatcaattgtaaaatgcaatgtctacgtagtacaacacagccgcgacacggatggagagaaagaattgcgcagtagcagcagcatcgacgagttttggcacgcccggtcactcactccgagcagcgccaccgccacggcagagtggcagcggcagcagctcggtgctccggcacatcaaaggaccaaaccagtcacgaacaaaaggtcaggccacgccgtgccactgcgaacctggcatctcgtcctcagacgagacgtcgtgcttcgacgacaccttctgcttccggccgttcctcctccggctggccgtgttcccgcttcgcgtcttcgccgcttgtttagcatcactcttctgctgcagaaaggcaccagccaaaatgatcagtaccgtatcaaaagtgtggctcaaatggatcgctacagaagaaccaggcgaactatagaaagagcataaagtggaagaatccgacaacggaactttttgttcctcgtgggcactaaattatcaaagacatccaagtaaccagaagcacagcaagtttggtgcgagcatgcgcaactggcaccaccagtctgaattttcagataatcttaaaaggaaatagcaaatacacggccttatcataagcatttatctggttggagatttaaggttggaccaggagtgctgcacaaaaaaggcgtgttacaaaaataaaatagcaaattgaacaagtcagcaaaggcacaaggcaacgtagcaatccaagaaaggacatacagaaaagcagaaaatgacgcatgggctctatttaagatgctagacaagccataatctcgtccaaaccttgtgatatccttaaatgacatagaacaccaccaagaaatgccgtaccaggcatatacaaaaatcctatcgcaatcaattttaatatataccagaagaaggtagcacactagactgttccatatacggaccacacaacaacgatgtaacagtgatggaaattcaaatgaccctatccagaaatctcatagttgatcagcaagtcctcatgtgaatagcacatctggtggtggagctaggatccgtactcacttggtggatcctccacaactttctggattatttcatgattattacaaatgaaaaggccgcaaaaggcttatgtgcaacatcccagtgaatggccccatatggcatatgcccaaacatctagtgggtccagacaaccaggaccccacaatgctctaccaaaaagcaaatctttattggaataatgaataaatatgttgaataaatgtaaacagtgtattgcccaatacagtgaaaaagagcaaagctagccaaaggaatctattccagagtacaagtatggtatctgatgcctaaacttattaagcaaaattcataaaccccttccctcagaaaataataataataaaccacctggccgttaagcactttttaaaaaaaaaaaaaaaaacatgttcagtgatcaacggcaggtcaagttgatttcacattatcagcacattcctttcaagagaaatcgtgcttctcaagctaatctagctgcaacttgtattctttgatgaagaaagcacacctccaccaaatagcataaactgttacttgcaccccaaaaaaggtatcacatgatccagtcacaaattgtttggtgatcaccatcaacaataagcaacagtgtctgcttaatcagaccacagtaattaagtaatcacagcagcgcctacctagatgcattattgccaaaccaaacaagtaaacagaaattgacatatgcgtacttaccccgaaacaaaaccctgattgactctgtccagaaccgacttcgctggctcttggaggcttcccagagtccattgctgatgaaccacgcttattaataccattacatgatggcgattctgcctcagtagctactggaggcggtggagacggtgacatcgaaggggaggttgaggatgttcgagtctggctttgggcctgggtatggtagcactttgagggtccattgcagaaacccgaatcaagatcagcttggaacatgtctacgaatagctgctgcagttctttaaagctctcctgcctctgcaaatccaatgattcattgttattttattgctattgttatatttatcttggatgcatcaggtccaggagaaaaagaggccggtttccagcttggttctagaaaaaatcacctaaaagtttcagttgaggggcatggagcttttcataacagttccttttttaagcctgtgacatatgaacatagaacaaacaatatccagtataaactatacaaaaatttccaaagtttacaagttttttcagataaacagcctggagaagttctgataacttagcattcatatatgagcattttcttttgttattccaatgaacaagaaatgattgtatgcatgacaaatgacatgcaaccccaaatagcatagaattcccaataaactgtagcaaaatcatcgctgagaaccagaggtatcatgacgagagttctagaaccacaaaccacaataatttaccatgtgtatacttgttttctcagaccaaaagcagtaagttaattttcaaccattttagcgtacttttgcaaaggacagaacagaacaggtatgatggtgcttacaaaatacagcgatagaattttcgaaacgaaatatgataatacgattagtcaaaagaacatagaaagtaataaatgctagctggaacctatcacgcattatgacaacacaaaaggggatctaattagccaatcacggttgcagctaaatttgtggtcctgatgtaccagtaccacctctcagctagagcctacgagaagcatctagtactaggaccaaggtgctaactgttcttaccgttggccgtgcctggctcatcatctgggccatctcaccaatgaagtcccccatcccctgcagctgcagcagaggcagtaggagttaaagttgaaccaacaatgacaataaatcataatcatggctagaatccttacgttgtcatcgtcattgtcgtcatcatcatatacccccacgtcgtagaggaaccgcttgtttgagtctgagaggactgcacaagaacaatgggatgggagcacgagggctccatgcaataagtttgccaactagctaaatccgttttctttggttgtgatcagttcattatctgtagcataatcgttgtaacaagtgaagtgattacagaacagggtggagtttgagataaggaagattaagaccggaataggcgccctggatctcctggaacttctccttggcttcctccatgtgctttgcactgctggaggatgagcatttgtccggatgccatctctacatcaagttgcagatcaggtaatgttaaattttggaacttttcacaaagtgcagtacaatcagaattggaccattcgagcagagcaacagatttgaacacttaggtcttcataaataaatattccaacaatcctagacggctacgaaaattacacacacaagcacaaaaaaatgactaataatagagtatgaacaggctggattggagcttttaatcattggctaatactagattacgaagtacagaacagaagcctaatcacgcgcagctaacgagcaagttctgatatgcaaaaacatgaacttggcgccatcgctcccactctacttcatgtccgtcttggaactaccagcttgggcgatcaacgaaattgagaagaaatgccggggtttcctttggaagggtgatgaagatgctgcgggctcttgcagcttggtggcttgggagaagctttgcctctctatcgagcaggggggactagggatcagaaacctatgcctaatgggaattgcgcttcgcactcggtggatttggctgcgccgcgctgagccagagcgtccttggatgcgcgttgcgcctctagctgacagaaagtcactgcactgctttgccgctggtagcaaagtactgctggggaacggagcctctacctcgttttggtgcgacagctggttgccagacggaggatcagtgcagtacagattcccaattcttttctccttcgtcaagctgagtgacatcacggtggctgccgctctctgcgacaactcctggattgcagatattaggggcggcctgtctgtccaagcgatgggggaataccttgcgctctgggacgtgatcgccgggatttctctcgaccccggaagtactgactctatgatctggaaggcggcacctaatggcgacttctcggtgcagtctgcctactctatcctttcggccggtagaacatcctgcccgctcggcaagattatctggaaatcccgcgcgccagtgagatgcaagttcttcatgttccttgcggtccgcaatgcctgtttaacagctgataacctgcagcgccgaggttggaagctcgcaccaatttgtcacctttgttctaaggatggagagtcctgccaacacatcttccaagcctgcaccttctcgcagcaagtttgggtgaaggttcaggctcgtttgagcctctcctgctcgccgccgtcctcagactttgccggttggtggctcgctgcccggcaaactgttgcgaagatcgatcgcaagacgttcgacgccggggtcatcctcgttacatggttgatttggaaagagcgcaacgcacgggttttcgagggaacggcctcatcggtcacgcagctgtgtgcgaccatgtgtgaggaatgggaaacttggaaatcagcagggctagttacctcgttgaatgttgctgcagtgccagctttagagagatcacagactttgtaatttgctttttgttgtaaaggcggtgctctgacacactgcatttgtacagttttccccttttcggcattcttcgccgtcccggcgaaaaaaaaaaagaacttggcgccatcatctacacctctccaaactcgaaatcgcctaccacggcacgctctttccctacctatgaagcagttacagcaacaaggcgaatccatggccgtaatccagttaccaatcaagaacgtggcggagcgacgacaacaacatgaacaagaacaaaaacaaagaacatttgcatgaagccgtcgagctcaattgctcaccatggcgagcttccggtacgcgagcttgaggtcggcgtcggagcactccttcttgagcccgagcacggcgtacaggtcgccgccgccgccgccctcgccggccgcgtcccggcacttctctcccccgtcggccatgtcgtcaccccccgtatccgccgccgcgcctcaagcacgggcaggcgccggccggccggggaggccgacgaccggaggagaggagaggagagggaagagagaggaagcaaagcaaagatggcgcgcgcgcgcctcgtccgcttcgtcccccttcttctcctccttcccttgccttctctctctctctctctcaggtcgctcgtctccacgcagtccaggaagcctccagaaacaaggccatgatgcccacttgccttttaaatatttctgcctaggaatttcctcgctttatttccacgtctcgcccagccttggctggccatcgttgcttttgctacagctgcagctagctatccctgcttccagacactgctactgttgcgcacagagccgtagagtctcgtcggttggctaataaatcaaaattaaaatctaaatttaaattttaaagttaattttaagatatttttaacgtaatttatttttaacattgacttttaaatcgctacgaacaaatatataaacattttatctataaatttatttttattctctcacaaatctttttgtttattagagaatatgaataatctatgaggctcgtaggatgtgccgtcagaaattggcactgtagatttacggttaaccttgacaatttgccatttttttcacatcattcgagaagatggtagtagatgcactcctgatgagcttatccggatggttaattgtgacctgatacctaattgatcggttttatgtggtttctgctatgtggggaaattactagctgcatcttctgttttgcacttttactgtatttgaattttcagacaaccatgcattgcaaaggggcctaattgattgtgattatcaactttcaacctggacgaaaaagatgttaatcaggcgaaagaatcgtttgaaaggtaggggcaactgctaatatgcttgtccttttcagtgtggctatggcgtgtgttaccaattgcgagtgccttttacacttgcgaaagccggagcaactaaagattcttagacaaaaagttgatctgatccacaattctgaaatacgtttagctggtgatgctactccattagacgctcactagcggttaattagtttggttatgattacacgcctgaagacacataatagcaggctataagccagctgcaaacatattttaagaagataaataaagagagagaagggcagcgagctacagatttgtagccaactgtagcacagactccaagacacagtgtgtgtataatatatggaactatgtattaataatgtagtatgtaactattgtataaataaactattagattagctatagataaattagagccagtagttggctacgctgttaaacttgctcttcaaggccgctcttttttccactggagcatcaggaaaaaaaacgcaacggtcgcctcgaagcagatgtgtgatgtgtctagaacagtgcaagacctttccagtgacatgtggggcccaccaccccacatctaaccggatcatttttcttttttttttaccatccgtccgatgggtggttgacggctgagatgtggttgggaggacggagatatttccgggggcgaccatccagaagtttcaggcgcgggtgcccagctggcgcctcgagggcggccgcgcgcgcttttctgaccgcgtcaaccacgcgccacctcctgcgagagataggccacgaagatcaggtgaaattacgaccactgccacgtcactctcctccgccctggtgcgttgaacctggctcacggtggacgccgcgaaacgtggcgcgcgtggacggcatgcggcggctgcggcatctttctggctgtgcggcgggtttggcccacaaagttcggtacgcgcgcgcgctcacgtggaacgggtgcaccgtgggccatgggcagccgctccctttgtcccgataaagcgaagtgacgatggtgacgacacgacgtgggccgtgtgccgaggccgaagcgtagatgcatatgtaaagtttccatgggtcacataggatttagagacacacattcaaattattaaatatagactagtaataaaaaaattataaattcctgctgtaaaatgcgatacggatttattaagtctaattaatatatcattagcaaatgtttactgtagcattatattgtcaaatcataaagcaattaggcttaaaagattcatctcgcaatttacacgtaattatttttttcgtttatatttaatactacatgcatgtgtccaaacatttgatgtgacatgctgaaaaattttgccaaacgatctaagtaggcccttaggttgccggcgatgcacgagggaaataagtccactttctacctcaactttacatcgagtttgattaacatcccttactctcaataccaggagagctgaagagcgaagtgtgcacgctgtgggggaggaaggcggaggtggggaggtagtccgctgagagattatggaactgggcctcccagacgacagctacaactaggaaaatgcttcaatccggtcgtccgatcttgacaaagaaatcggacgcctcttactgtgattttactgcatgcagcctttgtcagatcatctctctctgttacatatgcttcctttttgggtattaatatgcatgaaagagagatgacacgaggttacttgcatgtacataacacacttttagcaaacttgaaaacgatttttcttctaaattactcatccaatctacgaaccattacaccattgtattcgttacaattaaatctttataacaagatctcacatgattatattaaataaaaaaacacatatgtttcaaccaattaaaattaatgtttcacatatgaaaattagatgtttcaattgaaattctattatgttgcacatatttatttattgtcgcgatgtatatatctttctttaatgtatctcatagtgctatttgtatgtttcagtaagtagtttattgtgtttcactggtttatttgtaaatgttgcacatatgttggtcgagtgtttcaataagtatccactagtgtactcacaatgttccactaaaaatgtttcgcctagtgtactcacaatgtttatgtatagatttaatgttgcagtgaattgaaaaaaatcttttgcaacaaatcacccacatattatgtaaatcatctattaagagaattcgtttcattttttgttccacaaaaaaattttcactttatatcgatcaaatgttgcagtgacttgaaacattctttcgctatttgctgaaacattgtttttatataaggcgaaacaacgtccgatttaaacaattgaaacattttcgatctacctagtgaaacaattccgatatacttggtggaacaatgtgcaacatttaaaaataattcaataataagctttttttcactggaatatatccatgtgtggttcctttttaaaaatttaactgcaacgaatttaatggcgaatttaatggtgtaatcggatcatgacttggataaataatttaagagaaaaagtagtttaaaatatttttcatgcatgcatgcttcgtgatgttggatgtctgatggcatgcgcgtggatcggacggctcatgaatgcaccgatttttcgtctcgtgccgtacgtccgacgcgtagcgctctccctgcaactaactcctccacctccacgagttatcaaattgtacggtttcgtatagttgatgggctaagtttcctgtactgggaataagggatgttagttaaacttgaagtaaagttgagaggccataagtggactttatattccatgcacgaggccaccagtgtcagcaacagatttgatgggctcggtgtctgcggattaactctccaaccaggccaaggcctagactgcggtccaaaacagctgctgtgatgggagatttgggctttgttcggcccaatgtacaagtgggtacgaggttcttccaagtgtctcctgatctttctcgacgcgcgacagcgcagcgaactccgcgccatctcgaaccttcgcttccgctcgctttatacccattcctctcctccaccgccgtctcgccattgctgcagtagcaagaaggagagcgagagagcaaagcccaagttggtagccatgacggagctgttcgacaccgccgtgaccagcctcctccacctgccggaggtgctcgaccgcctcggcgccgccgccggggaccgccgctcggcgggcgaccacgcgcaccacgccgcgcatggacacggccagcaccgcatcagtggaatcggtggtggcgcgccagtggacatcatggagacccccggcgagtacgcgttcgtgctcgacgtccctggcctctccaagtccgacatccaggtgcgtacaaaatccgagccctgaatttcctcgattcgcgttcgaatcagcgagttagtttgggcgcgattctttcttgtctgcgcaggtgacgctggaggaggacagggtgctggtgatgaagagcagcaatggcgccgggaacgggaagcggaagcgggaggaggaggaaggggagtgcaagtacatccgcctcgagcgccgcgcgtcgccgagggcgttcgcgcgcaagttccgcctcccggaggacgcggacaccggcggcatctcggcgcgatgcgagaacggggtgctcacggtcaccgtcaagaagcggccgccgccggagaagaagaccaagtccgtccaggtcaccatcgcctgaatcatagcgtagtgctcgggtaatggcagcgtggcggtagtagaagctggaaatggttgccgagaatggttggagcagtagaatgtgtttgtgctctgttcgtgtttcggtagtacaagttgtcgctgatctgctatgtataaacgctggtgtgaccgtgaagatgaagactacggaagtagctgttcttttgtgtaggatcaagcaaattatgtcaaatctcgttcgtgaacgattccaaatcgatgcattatgttatgatctctgtcttatatgaatcctacagctacaattcttcgtttcctcaatcctgctagtactgcattgccacatcgtctccactagtatgtggggcggccaccatcaacggagctcggcggcggcgccatgaaaaggttgtccggtgaacgcgccgagcgaaagcaagcaaagggtggatcatgtacatacgatattatgcacgactcggtgcgctcccagaggggaaggagggctcgcgggaagtcattgcgttcgtggggttcggtgaattattgtccgactccctgtttggggagaacaaaaaccaaagtcgtcctttcaacagggcgcaacagtcgactgggaggcggagatgacggcgaaggtgatgaattttccggcttgttggtttgaatccaatttttgtgttaaaatcttagcgagttttagcactaccaaattaggtagtattgaatttgaattattgtgacaaaagtagcaaaccaaacatgtatttactactaaccaaacatgcatttgctactattaaaaaaattggtaagacaataaggcaataagttggtatcaaaactaaacgggcccttcattgtgtgatctgtgaattccatcaggtctattccatcagttattaatcctcaaatagctgctgcagtcgcagcgctacagtacgataaaacacgacatgatcgctgcgccgaacatgatcctacgtgattgtgttcactaggatcgcagtcataatttgctactttcgctcttccccatctgcgccgtcgtatgtgtatccaacggtaaatattgtgttcgaggggttcggaaactcaatcacggaaccgcctcgatagcgtcaccctccactacacatgcctttatatctttaccacctaatccgcgcgccttctaaaatatactattgtaattgtaaattgttctactttgtatcactttctctacttttcatgtcaccgccgcgtgcacgaccgtcctagctgctgaacgtcctcgcagcggcggcggcggcggcagcggcgatgaggatcgaggaggaagaagcagtggatcgcgacccagacccacatcaagggcatcggcctcaacgtgcgttctcgcgcttctcctccgctctctcacccaccttggaaatgtgtaatcctatagatattttagaggaaagttagcaagaggtctaacctcttggaaaaattcctttgagtctatctatctcacctgattcctgcgtttttcctgtggtctaatcaaatggtcattcatatgtttttcctgtattttccaatcctatgttttacacctacatttttgtcagaattctgtgttttttctattcctccatttttttattcatgcgattctaaggggcccttacttggcagatgaacgatgaatccatgcattgtgcggtgtaggagtatgtctgcatatatgagtgcagacaagaagcgtctactctttaaatacacaggaccaggaaataggaatctgtaccagtttctgaaccgtgactacccaacagcgacgacgccgatcgatcaatcaaaaattcagaatagacccatcgctaccgtcctactagtagctaacctcttccaatcaaaccctccatgcagtgcagaaaaaaaccatcaaaacttgaatgccactactcttcctgcaatcgatcgatcgatcgattgatcagctgggccagaagggaacaaattaacaaaacgacgtccatcgcgatcgatctttacttgcaaatcgcgccgtgccactggccgttttcttggcccacatcgtcccaggcatcgccattggggagccaataattccccggtttacgggcgtcgccgtcttgatgatgatgccgatcagcttaatcgtaacatgccaaagagccctcgtccaggggaagctaataacttcatccgtttcacaatacaagttattctaacattttccatatttatattgatgtcattctagacatatatatgctaaaatgacttacatagtatatatatatctagatccattaacattaatatgaatgtgcgaaatgctaggaataagcagctagcgctggcctttcttagctgaatttgtctgttgctttcgctgctgcctttttgcctagcaaaaaaaattaagcctttggaatccgctccgggacgcgtcacgtcggcgagtcatcggcgacggcgacggcggcatgctgcgtgagtgctggcagcgaaatggttggatctagtaataagctttgttgcaacttgcaaggcacgcacttgatcggatgagaacgatgtaagtagcattttgtcagcaaaactcagctcccaacgacctaccaaacacagagcaagcccgtgtggtctggaatcaggaaaacaggacatgcagatgcagagaaacatgcagctctgttcgtttgaaaggtttggcctacttgccagagaagaaattcaattaacacataatcaatcaagtattgatatcataaattttaaaaatagatttgtttaaatttttaagtaatttttacatggaaagttcttctaaaagaatcatgttgtttagtggcttggaaaacatgttcgtaatatattagctaatgggtggaaaataacggggccttaatcattatagaagaaattttctctcgtttgagctacagcttaaaaatgaatgaagggaaacaatttgtaaatataacttttagaaaatctatgtcgattgtggttttaaaaataacgttggaaactagcgtaagataagaaacactaaaatgaactctaaaaattaaatttaactataattctaaatttggctgcagttgataagtagatgataagagcgttaattttcttggccagctgatctaaatctgaactctgaatttctctgccagtctctccacttgtaacatacttttcctgttggattcgtcataaaaatcgtcactcctagtttcccacacaggaaaaagtgtaatccgggacggccgagtcagctgcgaaatgaacgcatgcccgatcggtcagtcgcttctgccacagtgccactgcacgctgcttgctacaggctacagcagctacagctgatttctgatctgttcgcagtactgcatcacaccactgaccggagccggccgccatcagagtgtcagtgactcagtgaggtcagcgtcagtgacgagcctgttgcatgccggccgcggcaggcgaccggccggcccaccggcgatcgatgaggtctcgcgcgaagggtcgcgtgggcgaggtaagcccagctagcgccgacgacgacagcgacgcggcgagctgcgtgcgggcgagggcgaagaaaaataagaaaaggcgcggctaacttattcgcaaaagttgttctttggagctttgagcatgagctgtactactaccgtacttgcttgatttaatttggagtgctatgatcagcctagcaaattaattaaagcagctgttttaccataatggagattaatcgatccaatctgctctgaacaccaatactcctagctataaagctagacattcttcaattttctccgtcgtcaatgatgtggtcccttttgatcgatgacacgagagcccgacctatttattaggtacacaagctccggcgattcaaacagttttattctgatttccaagtgagatggtctccaattaatcccctgcgccgaccttgatccagtccaacgattaggttatgcgtacatgcagtgaccagttaattagttttgctgggtggattattgatatcactattgatgttaattatcctatcatcattgatcatcctatcgacggctgaagctaatggcatgcataaacggtaatcaattaacagtaatcaactcagcttgaatctggtcgtaatcttcactgtctgagggcgatacaaacatgcatcgattgattattggttgcctccgctgtaggcaccctccctctcgaagatgtcagagagcaaggtccccatcgtttggcatatttcctaataaaccgtattaggaaataaaaataaatttgtaggtaaaacttttataaatgtgttcttggtgatttaaaagtcaatgttaaaaaagaaattacgtttaaaatatctcaaaattaagcatgaaaatttaaaatttggctttttctttgactgattagaccatccaatgggagccagagtaagcatatatcttccctctcacagcggtttctctacaagccatgcatcgagtctcttcaattcgcccccccttttctcatttattatctctgttgttcgctgtcatgcgccctgcaaattaggccttgtttagttcccaaaaatttttcgcaaaaatatcacaccaaatatttcaacacatgcatggagtattaaatattgattaaaataaaaagtaattgcacagttaggatggaaatcacgagacgaatcttttgagtctaattagtccatgattagccataagtgctacagtaacccacatgtgctaatgacgacttaattaggtttaatagattcgtctcgcggtttccatgctcgccataaaattagtttttttattcgtgtccaaaaacccctcccgacgtccggtcaaaccttcgatgtgacaaccaaatctaaaatattttcccaactaaacacagccttagacggcaggtgtatggctctatctcgaatataattcatgtgatagccactgcacgtatgtcctgtatatataccagattaacgattatgctttgtgttgtcgttgcgaatgaggaaagatggatttgacaagagctcgctagttttctgttgatattttggatcagcacgtctagagcgtgcaaacaccgtgcatatataatagcatttgtaacacaaaacaaacacgctattaaaaatatttggcatgtataacacggcaaaattttagttaaaattttttgaccaatctaattatttaaaatttaactaaaaattgttaggaaatagaattaagaaaactagtaaattaaagggggtctcgagaaaaggaatgatccaaaatagaactatgtgggggttcggtagaggcaaagttagaatcttactaatgaaagtgtagtgacaagcactttaaaaaatgacttaattaaaattgatagttattgattaaaaacagaaggagtaattatttaaaatgcatcaggatgtcaaacaacgtctatgtatgtgatagctctctgatctctctctcgatatttttatgtgaaaccggccgttgcatattgttaaccatataagcattcttcaattattttgttgtttattcttatatatatgaatagtctttcgtatgagaacgataagctgtgtgcactattcgcggtgaatgcacagttgtacgaatcaatcaggaaatgatatttaattttgtggttatgaaacatccacatggaaatagtactgcctgttatagtcagcagtacaaatgaatatctatagaaatattttccataggctctcgatgtcaatgcatatctatagcaatatgttgaagaacagaaaaacccatagtactatttaaatgtactcattgtgcaattgaatcttatgcaaatcaattatctgctgtcatatcaataatgtgaataactaacttgtgtgatacatgatacctacaatggaggaggttagcctcaaatgtgcatcactcacacatgtttaatatcgcatattaatcgatctcgttgaatttttttcataaccatttagataacatgcaaacaacgaatggatattccctcgatagtttagaaccaacaaaccacaaatgatctagagcaaaatttaccagaacaataaacaacagaagagaaaaattgattatatgcatgtttttcatatcatatcatttttttctatggacttgttccaacgtagttcagcaaagaaacacttaattatactctcggtcacgtttgattgaaatgaaaatttacttccacatatgaatttggaagcatgcaaatattggattgccagctagctagctcccttcccgtttgaatgggattcatgcaataaaaacaaattttactaaaatgaacaggtgtcgattaattatatcacatcataatgtcgacatcgatcgattctactgcaaggtgtgtgacgacgaaacagatcgatttacgacatccatgacgtggacatcaactctcacgtgctaataatagcctgtgtatctgtactctgtatgcatacgtagttatacttaagggaaaattgcaaaaacaaccctataattcacttgaagtttgagaattgcaaaaacaaccctaaaattgcaaaaaaaaaacatttaagttattgtcagcaattttatttgtgaaatctcaaaaaaaaagtatcaagactctggaagtacttcctccctattcgtaaaggaagtcgtttaggacaatatttaagtcaaaccttaagaatataaatcataaataattctcaagttgttgagtttgaaaaatgtaaaaattatataaatagatttctcttaaaaaatactttcataaaagtatacatatatcacttttcaataaatatttttatagaaacaagaagtcaaaattatgttttggagaccgtatcgctgtccaaaacgacttcctttacgagtacggagggagcatttattaaaagatattgattcggttaagcatgtgtatgttgggatgatttttgcaacaaaactaaatatatggataaacatttgtaacaaaataattaacttattggtggaattttaaacttcaagcgacttatgaggtggtttttgtaatttttcctgtacttaatagtgtgcttaattaattaggtgagccgtctggacaatggaattatatttgtgtggaatatctctcgattgccctggacacacatggcacatcacatcgatcacatatgtacgacatcatcggcactgttgttgtacgtgtacggcgtttctgcatgcacatcgtctttgtcgtctacctgttcttcgttcgtgtgttttatatcgcatgtgaatcatcagtggtgtattaaatcactttgttttcgcgtactcgtgcaagctagactcgatcaaattacagtgaacctcccttagagagcatctacaatggtaaagtaagatgctctctataaaatatgtatatctcagtaatagactagattaatagtaaaccacctcaataatgtgtctacatgtgtatttatagctctctaattcattgtctcgtttttctctatagactatctctaggttagtagatagctttgttctctcttcatttaatctcttccaagttagataatatgctgatatggatctcttatagatagcctatagataactattatgggtgctcttttgtcgtcgtcaactctctctgttgtcgtcgttgtcgctataggtagatcaccatcaaaaccgattgcttaattattaattaatgcagtcgaagatgagcacattaagctaagcaaatgccgtgtaggtagcacatggtcacaaaaagagagatcacggcctattgatcgagctcattaagcaacgcgcaaattaattaaagaagtacgtcgtattaattaatttatattatagggagattgcttaatgttatttatagggagtacttacgtatatacatctgaatgcttgtgcatctagctttctagcatgtacgactaattaaggaaccatccgtgttttgttaaaccatgcaaattgcgtggtagagtaccatgccaatccaagataaaataactaatttgaaaattgtaccgctccattttttatacaagaaaaatgtagtaacaagtcaatagcaatatatgtcacctaacatatatactccatctgtttttaaataaacaaatatagtattagatgtgatacattctattactataaatttgtcatatattggagtatagccaatgcaacaactagctcatataataatcgctctttctatttagaactcatttggttcataggattttcgtagagctggcaattcctttgtttttttaactgtttatgtattttggttcgcatgaatcgagtgtaggaatttcgaaggaatactgtagcaattatgtgaaaataggaatttcgcgggactcaaaacagctactccgaccccgttggctggcataggatggacgctattatattttgctcatgtaactatataatgttcttgtgtcttcctatcctacatttggaataagcccttgtttagtttcaaattttttcttcaaacttccaacttttccatcacatcaaaactttcatacacacacaaacttctaacttttctgtcacatcgttccaatttcaaccaaactttcaattttagcgtgaactagacacaccctaagccctttgctataattaaaccccaaattatggtacgagtctttataaactcatcactgtatatatgcagataaagtcctagaaaaaatatactcatatatagctatagattctttgatctagggacaaatacaattggcgcccaccgtgtgtggctctcgtgtaggatgtggacccaagaaaaaaagctccaaagttttcggtgcatcgcaccaacgcaacgtagcgcctgcctccaatcattgaggcgcccgcaccacgcacgcaaaccccgagcccgaggcactcgtccaactggatccctccacgtccacccggtcaatcgcccggcctctctctctcctctctggtggctcgcgccaaatccaccccgcgtatgcgttgacgtcgtgcgcgaaccagctgcaaaacctgcgaccacagcttcgattccgcgaaccagatgctccttcctatggaaggaagtaggttagcgtctcgatcgcaataagctgtgcgttttctttgttcttggatgacgtcgctgggatcttgatggtgtgcttagtttgttgtgtttttataccttgacagttggaagagcggtttgaatctaatctattgttattagagtgttgtcatgtatacaaacagcatattttaaatatttttttaaccatttataattttagaaacgaacctttccaacacttgttttcaaaatctaaatcttttgactacgtcgctaacctaggtggcgtgacaacaagacaacgctgtaataatagactggcgtggtaacattattttgcctcaaaactttcagattttagaaataatttttgaaagtgtttatttttaaaattaaaaatttcaaaaagtaaaaaaaatcacagactgtatccattattaaacttaccatgtatgatcagataaattttattccttcatgggatcagtatgatttacatatgtccaaaacgggattttcatatgtccgaaacggcagtgatattcatacatttaaaatttcttatcacctttgttcgacactttttttcccaacccctctctctcctttttcgcgaccaagcctatgtaaacaaaccactgagaatagttagagaaggactactcatctcacacggtgaattggcaataaatgagaagcacaaataatgttaggttatttgatagtgcagtgatggccgtgtgatttcaatttggaaatgtcgtgttcaatctccacactttcacactttcttattaaaaatgtttagagggatgtctagcattccaaatcttttttttatttacattctatacatttctactagtatcccgcaaactttgtatagaaactactcgcaagctttatataaaaactactccggccaagaaaaaaattgctcgcaatagcatactactcactccgtttcacaatgtaataaatctagacagtctagatttattactattaatatgaatatgggaaatgttagaatgatttatattgtgaaacggagggatgagtatttcactattttgcatcagttctctgcacggtacgacagtacaacacggagatgatacggagacaaatcagccctgtgcgtgcttatccagtttaccgtctccacagggaaacggactcaaaaagctaaatttaaacggagagcaaaatatttcccgtaacaacctgtatcttgttgccctcctcctccgccaactcacggatttcttcttctctcctcctcctccgcgaggcgaattctcctcctcgtcgccaccgcctcctcctcctcctccttcccacccacgcttctcccgcggatctcctcctagaagcttccacggctcgcgattcgagccccgtgccgttctccgccgccaccggcgtcggctgatgctgcggtgattggcggggaatgctctacctcaagcttccggcacgggatttagggttccggccggcggcggcggcggcggctgtgacggaggggcggtgatacggtctccgcggtggtggcggaggggggggattggggcggttgatttgagcgggtgatccgcccggatcacccccgtccatggctgctgcggtggcggtggagcaggaggccgcctgcctgcagagcttcgagctctacgagagcaagtcggtaaggatggcgtcctgcgtgcgtgtcccaatgcgccggcgcggtttgctggtgctggtgttgcggcgtcgtggtggtggtggtgggggaaggttgtcccaatgcgccggcgcggtttgctggtgctggtgttgcggcgtcgtggtggtggtggtgggggaaggtttcaaggccagattgtttgattagagaggaggcgggacatgttgcttcgagctgtttggttagggaatctgatctgtttggatcattgggaaggtgtcatttcttcttgttgtagccgtgctgcgcagctatttgcttaccgtcatatctgcggctgttgtagttattagatcgtagccttcaatttcttcatttgtggattaattcgacatgctcggtctaatatgtgttccaagtgcaaggccgtttctgaaaattgtttgtggataatatttgtacattctaatggttgtcagatgaacatggagagttagctaattggatgcttaacgtttttaggggatttggggatattttgggcttgttgttttgataggatttcttggggagttttgctgatgctttttttattgcttgttgtgagtttagtttggacttttggagatagcatatttgaaactttgctgatccagaaggcaaatacacagtcttaggaaaaaggctaatatctataaattccttcttttatctcagaagggctgactgtctctgcagtctgcatgcttttcttgtgtttggaattttgctatgatctgatcgctagaaactctgctatggtagattgttggcatatgaaattggtgacaaaacgtattagcacaattggcaatcacgttcctgtgtagagacttggcctcatatgttctgggtgttcggtgaaaatattgtcaatatctctttttaagtatttcacctgtgtacacaatcactctgttggtcagtatgcttgcagcttaggtgctcaacgttcttggatccagagatttcattaatttccttgttcagtaacttgtgcttctggtcacaattcttaaccaagtattttgctttgcagaggttttatatttttggaactaacactggcaaaacacattggagattactgaagattaatagatcggagccatcggaccttgacttacatgagtgttgtactgtgtatactcaaagtgaatatcatgaactgttaaaaaatcttgatgaagaccacaggttgactggtggtgtaaagtttgttacaaaattttatggcataatcggtaagtagtccaacccctcctcctttgtttataccctagcaaaatttaattgtattacaatgcacttgatgatgaaatatcttcgcaggtttcataaagtttgttggaccattttacatgttaattattaccgagcagcgaaaaattggggagatatttgatcatccagtataccaggtgattaagacttcgatggtcgagttagcgaattctaagacgcgatccagatttctaaattccaaggatgagaacaggtttgttccagctgcaagccttgagtttttttctcttttctgtctttatgcataaaaaactttataatcagtacatgaagatccatttcatcaactagttccaaagttcacatttcaatgggaatttcttcggttcgacacccaaccccatgaaaagcactctgattatgatattagatattgtttttatggaccaaataatatattatgggaaaactgttcctagtttttcatttccggttaactattgcatttcttaaattagaagctgattgtttatgaaatgctgcaggtacaagaagatactgaatacacttgatcttagaaaggacttctttttcagttactcataccatatcatgagaagccttcaaaagaacttgagtgatccacaggaaggctggaacatatatgagtcaacttttgtgtggaatgaatttctcacacaagggatacgtaattttcttggaagtactttgtggaccgttgcgttggtctatggattttttaagcaggtatgtgtcactggaattagttttgtggaagttgttattatatccatctatgaatatttttaataggaatgactgaattattcacaataggatttatttttaaaaaataagactggatttttaaaaagcttccagcctaccaatattcggtaggagccttctaaataactccttgctaatgcgaaggaaatcaattcaattgtcctttttttttattcattcattccactaacagaatgaagttgttcagttgtcctttttttattcattcattcccctaacagaatgaagttgttggatgctgctcacgttgttcatataatttaatcttgatccaaccttcttctcactaattatatataattacctaatattatccgtctactacatatatttttttgccttgattattaaaaatgtggatgttgtgccattaggataaaatttcaatatccgggaaggacatcatgttcacgctcattgctagacgctcaaggcattttgctggaaccaggtttgtacatgtgctcattaagcaattattttccttactattgtagcaggatttggggtgaaaaagtttatctgctgctgaacagatatttaaagaggggggtgaatgagaaaggcagagtagcaaatgatgttgagactgagcaaattgtttatggagctggacctaggcctacagaagtaagttctgttgtgcagaacaggggttcaatcccgctattttggtcacaggagacatcaaagatgaacattaaacctgatattatatgtaagctcttaaacctatctatgatgcatattatgccatgcagtactaacttctgcaaataaattatcaattggtcagtgcatcagaagggcgagaattatgaagctactaggctgcattttgagaatcttaggagaagatatggagatcctatcattattttaaacttgattaaggttagtttgaccttgttattccagagtagcagcatcttgtgcaacatttatatacctggacatgaatgatattttggtatgccttctcacatttatttttgttgttcacatgggaagaaacgtgagaggcgagagtcaatacttcgtcgtgaatttgatagggcgataaggataataaacaagaacataccagaggaaaatcatttgaggttcttgcattgggatcttcatgaaaactctcgagggtattgattgttgtttttttttccatttcccatctgccagtattctatagtgtgcatgactgaagtatctttgttttagaaaacctacaaatgtgcttgatgttcttttgaaagtggcgttccgtgctctgaggttgactgagttcttctattgtcaacttgcaccatctaccggatctgatactgctcatcattggccttccctattgtaagttttttttccttcccaatattaatttgtccgttatgatttctgttgcgttatatgtcaaataatggtttaatgctcctatttatgtgttccattccattttctttaggagtggtcttgatccatttttatgtgaagaaaacagcaatagcgacaacacagactgtacggaaattgttggtgacatatcccaagaagacatctctggcagctctgattcctcttgcaatggaactacagaggataaagctgaaaacaacgaatcacctccactaaaaccaccaaaattccaaaagggtgtcttacggacgaactgtatagactgcttggatcgaacaaatgttgcccagtatgcctatggtttagctgctcttggacatcagttgcatgtgcttggttctgtagaatccccagaacttggtttagatgaccccttggctcatcatttgatgcacttttatgagaggatgggtgacacccttgcggtgcaatacagtggttcggctgctcataacaaggtatttaacaggaaatccatttttttctgagaattattgaagtactgcaagcagcaggataaactgttggtgctcccatgtggtgatcatggattaaattaggaaaaatggtataattgggttattctagggagaagtgatattctttggttgtcatggctgcctggaagggaattacagcatttgattttaagatttaatagcttaagtagcatttgagctcactaaagtgcttcctttttcttatctttcagacttccactatgaattatttaacacgcataaaagaacttcccttgcatgattttctttattatgaaatcaacatttatattgacaaacctgcttagcttcagttggacaatgataagagtaaggctctttctcattgaaggacattggtggattctgcacttctgttctattactaaacttcagtagagtatatttgcccttttgcttgacatcacatcttttattttctctatttcatatggtgttctatttctcattttagctgaacatttgtctaatttctctttactgtgatctttttctgaagatattctctgcaaagagaggtcatctgaagctttttattcgatcacaagagttcttcagaacactacaacggcactacagcaatacctgtatcgatgctaacaagcaagcagccataaacttgtatggtttacagcatgtgctcactaatcagaaacacttggtctgaccaaaatatgaacagtggtcgttgttcttacatttatttatgacttgtttttttgtccattgtgtatttcagatttcttggctacttccaaccacaggaaggaaaacctgcactctgggagctagagtcatcttcagtggatcatatcgctgtgcacgcacggtaagcttaagaatattcgtctatatgaccatgcaatacattaaaattagatctgcaggttgtactagtttgttgatgatgttctaatattactgatgtttgctgggattattctataaatactcgcaaaattcgttaaaacatatgattcacctatttattgtcctagcgacctgatgcgatccggtaatgaataatatgcccagtgcttatcaatgcatgctatccaaataaatggtttacaatttaaaatctataagcatctagcttgccctagctgcatgctcctccctttcgcatgtgaaataattgacaagtagaatatcatgttcttattttcatcttataaaattaaaaggtagcagtattaaatgccattgaaaaacttgagatgatcatttgtgctacctgatatgtcactgctctgtatactatgcgaatatggactaagatctcctgatgatatgctgttatggaacacacaacttttggtaaaaacatccttgggagtttaaaatcatggtacaggagtcaatggtgcgcagtagcgaaaacatagttaggagttgcatattatgctgttttgctattccaaaacgtttttgaactgtagcaggatgcttgttcctatttaaacgagagcttttagccatttattaccttttgtagcttccctgcttgttacgttcgaagaaaacaaaaataatccgtactgaaatatgcactttgtaaaacagtaaggggttcttaccattgactgttttctttaattccacagtacaataaaaagagtgagatcagatggcagcattctttatggaagcaacacatccatatctggatgtagtggttgccataatgaagacaaggagctgttgaatgcagcaccgcttgatgttaaaagtgggtcacaatttccagtgttggaatctgattcagtacatggcaatgaaatttcattgacctgtgaaagtgaggtatcaaacttaaggttggtttctattcgttcaaggttttgaccttcactcttctcatacaagtattttactagaaaatcatgaaaaagcatggtattttaaatagtggactactaccatttgtatttgagaccttaattcctctctcaaaattcgctacaggtatacacctatgatacctcagacacatcatgttccaggcggcgttgaaactgaaagtagcattcattctggtgattcaaactttctggatcttgaatggctttcaacttcaggcaactcaagcgatgaaaggtgtttgcttttgcattgctaatgtatttttttttagcgttttcgactgacagaatatcatcttcacagtgacagtcaatttgatttacacacattttctttgccttagtgtaggaaaaagtgaaggataattattagttgattgtccagtaaatttcttacccttaatgcttaattccatatcaatctaaattctagagttcttttgctctcactgcatttccatgtaataaacacaaatctgtagtatcgtgttgtatcacttgatataactatatgtattgagaagtactacctccgtcccataatataagggattttgactttttatttgtaacgtttgaccactcgtcttattcaaaaaatttgtgcaaatataaaaaacgaaaagttgtgcttaaagtactgtggataataaagtaagtcacaaataaaacaaataataatttcaattttttttgaataagacgaatggtcaaacagtgcaaatgtcaaaatcccttatattatgggacggagggagtaaaatggaaatattatgttgccacacttcctaaatccaattaacaagtgtcttctgagcttccagtatgttcactgatgctaatttgaagatatcctctgaaacatttttttgtaactcattgaatgctgatggattgtgcttgaacaggtccattgcaattagtactccagatgtgaacctttcagcggagaatgttataagtggcataaattctgagaccatggtgagcatatgttcccaacagttcgattccgctaaattctgttctttgattttgttgaaatttgttcagaccaattctggagattaattgtgtgagaatttatagtggtagggtagagatcatgtatgcaaatatgcaatatcattgtgctaataacataaccaattgcgaaatttcaaacttttcaggaaaatcaagatgctgatatctatactcagaatttacctgagcatttcgtgcagtgggttaaccacggagacaccttttggtattaaaattacccgatgcttgtgtcatgtacgcggtacgcgttggctactttgaaggccaaaacttgtcttttccaagtggtcatgagacgggaattggtgatttgagtagggaattaggagtgagaagagatagatggcacagcaaacttcagacattcgccttgtgatatatgtccacatcatcccatagccctcttaggaaagtataacattctggttatttgttcccatctttcttgtaggagcaagtagataggcgtttttctcaatttttgaaaagaaagtagaggtagattcatatggatatataatttttgttctttcgaaaaatgtaccattgtgggaacattccgtttgatatgtaaatattattttatgcttggcgtgttttgggttgttgaggtcacaaggtggattgtaaagcatcgtccactatatgtggcttggttcgttgattatcatccgcgcttgtcgtcacaacatactctgatatttgaaatggtactccactcaaatcaaatgcgtatgccatctcctcatcagcctccattgtaatttttaatttctcaaagttttcgaggtcatgtgagatctggagtgaaggctacatataatacttgtgaatgtttagtccttcgagatttgaacgaatatgttcctttttttcttttaatgaatgattcgctatgctcagcaatcggtatcagaatcccaaccaacagtacaaggtaatacaatacgattaggagccaacctaacagagaatgtgttaggagcgaaccatcagattagatcctgtgattaacctgccgcacccagagttcgatgctaacctcagttttcagttttctagcgaaggtaggtgagattagagcttcaagagaggcaagtcaaagttggtgcagctgaaggaacatgcattgcacaagctctctcactcaaaagtttctaaacttgttgaagggttcatatacaacggcagcctattgaaatcttaacaagctttaggtaattaggtagagctgtctcgctctgtcccgcacaatgaccctggccaacgggagacaaacggtggtagtgtttggcttgtgatgctcccttgatggaacactagtggccaccacgtttgataatccttttgtctttaggggaagccatgtgatttatgaggatagcaaaaaatgatgcgagagaaggaaaagggcatgacccagccgtaacaaatcaagaatgcgatgcgcaagcgcaaccatgtcggcatcaaatcacgaccaaccaccatgacatgggaccacaagtccacaactcgtaaagactgtactgacattgaccatgatccaagtgtgatgcaaggatattttgacttggaccaaagacatctagaatagtgctgcagttaaacattcattgaaatttcgcccttcttaaaaaatatctaacagtcacgaagctcgtaggtcttcgctctgaattagtcatagtcttaacaaaaatatctcgagaagaaaaagtgacaacatgtgccaaatacccctcttgttatcacaaagcttatacctggccggtcatactgcctattcacatcaagaaaagaggaagtgaagcatctttccagaaatcctgattctggatggcacgcgcccagtagcaagagcaacaaccctgcaaggctgcaatctaacaagatataatatataaatatatagtcaatgcactatttaatttcggattcaacaaatgaattatgtacagaaaatcaatatggtagctagttatcaccaacatagcgcagcacagcaaagaccgaaagaaagagcagtcaacaacatagattaaaacataatggccatggattcacgatgttcatagccatatacaggtagcaacgacagaaaactagaacggaaaaaaaaaagcagttcttgagtctcatagatggctgccatacatagacagcggatagggaacaggtccaatcaccaaagagtttcaggatgcagccttttgcatctaagctaaacataacgatatgctacccccaaggtgccatgcaggtgcctcccaatctccaatagtatttattcctgaaaaacacaagcaaaattagagcaatgtaaaaaatcgtgcatattcagagagaaaaaatcaaattgataatccttaccttttttttccctgtgtacatgctccgactagaagacttcgaattcctcaatagaaatcgctaacgggcatgtcatcaaagctccagaggtccatgttgctgacaacatcctgtgatccatccaggttgagaaggctatcaattgagtcaccagcaccatcatccagaaggaacctcatgtagggttctaaatcaggcagatcaacagcactgttctccataacaggagggaccattgggttggtactgctcttaatgaatgcagattcatcgacttcagctatggttgaaatgggagcaattgatgtaatatctggtgtcttggtatcattctcccagccaaagtcagagcagccaaatgagttgcttccctggtcagagttgatgatagggtcctcaataggagcagcagagttcattgcaggaacaaatggcatgttatcaggctgaacaaacggcttgtttgaagtgaagttagcagatgggtagacaaacgcatttgcattggcaagattgttgaatgctggtttgacagtaggcttctgttccacacttgacttgggtgctttagcagtggtggagccagcacgacgcttctgagcagttgttggagcctctggaaaattcaccttggccttcttgccacgaatcctgcgtgcttcagcatcataagctcttgcagcttcttcagcactgttgaaagtgccaagccagacacgaacacccttgcgaggatctctgatttcagcagcccacttaccccaagggcgctggcggatgcccctgaattggttctttctctttcttttggcagactttgcagcaggaccatcaaatccggcagtggtaatggtgctcaagttatctgcaatggaaggtcaacatcaatggcaagaaattacacagatgaacttctcttgctgatgttattttcttttggtcacaaacatgaagttggaacatgcaaccatgcgtataaacattcaaattttaggaaagcatatctcaaatcatgaaattcaagattgtaggaaaaaaaacccatgaatggacctcatcatttctgcaattgcagtctaaagttgtgctttacggactaacatcaatatgctgcagcaacattaattgtaaacaaggaacaccaaaactgagttgcaacacttcaacaaagatctgtggtttagctcacacgactgactagatacaaccgatttagacaatttacacaagaggtaacatccccataaataaaatgaactagtatgtctaagcaaaagaggccaacaaagaccacaaaaaaatgatttgacgctattgaccgaaagatagaaccaaaaacaggcaccaggacgactaaacagccaggagtatatgctaaggcatgtaggacttgacagtcaacatcataaaaatcctttacttcgactaatagttgaattacgtccggaacaatcctctcgcaatcatacaaccacatcaagcgatactagggtcatccatctaacaactaagaacccagatggggagacctccaaagagaacggagaataatttcccctttactgcgaattcaactccttggagaaaaaggtaatcatatggattgcgcaatttagaaaaagaaaaaaaaaagatcgaacagtgcaagagctgaaatggcatctctaaaatcctagcagacagaatcagcacatgaagccctgatcaccacaaataagacatggaggcacatcattccaccctaaatcaccaattaaacaggagtatcaccccaaatctgatctctcaggatcaacccctaaaattatctatcccctttttttcctcccaatccatccaccgagcgtcctcgatccccaaaaaaattcccaatcggccgtagaactaacgatttacaacagcaatcaatccctgaagaacaagtaaactacacaaatcaagccgctcccagcgacgcccatacctctggagagggccctcttgaaggcggccggcttgatctcgacgacgtcatcgtcgtcctcctccccgagctccaaatccgagtccccggagtccacctcgaactcctcgaagtcggcctcgaagtcctcgtcgtcctcctccacgaaccccccgaagtggcgcctcccgccgccgccccacctgggcttcttcttctcgggccacaggagcccctccgtcgcccggcgcgacccctccgggtgccccttcaggtggtggatgatggcgccgccgcacatggctcgccgccggtgagccctcgccgccgatgcagtggtggattgcttgcggaggggggcgaaatggtaggcgagagttcgagttctctcttcttcttcttttttttcttttctttttctctttttttttccctcaatcggttcgacaaaatattggagagaagcgtgggtgggtggggctttggggtttttatatggcgggaggtggaggaggggcacgtggtggggcccacctgtcagccagtggatgcttgcagcggaaggcgcttgggtagaagcggggcaggtacggacgagatttgtgctgcctttggagtttttcagttcgccccttcggagaaggtcattttacaatgttgcaccttcagtttattcatttttgcgttttactccttgaatattgaatgcatcgactgccggagtaggctggctagcattgattgctggcactgagaaagtgagaattgagtggaataattagcgtaatcatgagtaaactgatacttcctccattccaaattgatctatatatagtttttttgggttattcttaaatgatctacatatttgtgttcattcattaagtctattcgttatttgtgcattagagtaaatggacattgatgcatgcatccatgcacacaagtatttataacccacatgcaatatctcgatttgctattgactagaaaatagtgatgatggtgcatgtattgaatttgttgctagagtaaatgtaatatgagagagttattagcttttcttggtcttagtgtacctataaaatatgtagatcaatttggaatggagggagtagtacgtagtactccctccttcaaaaaaaaattgtcctatttctttttcaccaagaacaagaaacaattaattcatttatcatatgacaaagccaataaacatgcaacaaataagtattaaaatacttttttttcctatcaacaatttaatttagtacataataactacaaataggacttagacttttggaaaaaccaaagaatgaaataggtgttaaacttttagaaggagggagtactacgagtaataataacctcgaaatattattcatggttaatcatttatgaaaatcattccgcgtgatctttttattaatattaccctacttcccatatctccttaactaattaaggttttcccatatttctttaactaattaaggttcagaagaggatctcatctgtaataatgcaccaaactgaggacctataggtttcaatcaaaaaattccagggattaagcccaaattaaccaccacctcctcacaatgtggtccactacacgacactgtacttgcagtgttcctccatggaacaagtcacggtagatgcatgcacttaaaattaatagcaaactgatgcgttttttatgtgaccagttgatgaattgtacctagtactagtatcctccatgccccaaccacccgagagaccaaaaatatctcctctctcgctgctgctgctgcgtggagcgtgtgtgctgctggtgcgtgcgtgcatcgcgttgccaccctgttgatagccatcgcgttgcgttactgctttggtctttccggccttttctccggccgttttctccgcacgtttccgccttggctgtctggcggagaaaacggctgggacaaagaagttcgtccctgattttcggcgaaacgtgacacgagaaaaaaaaatgtttatttgatatgttttaaaaagtatttatattaaataatttaacatgaaacatatcttctatataactagatacatgcaaacatatatcaatcgaaaaagaacatgtttatacgcagtgtagctgtttatagtcgtcgattaaatttagtcgtacgtgagtcgaatagttggatcatatgtataacaatttcttcgtaagaaataagaaagtagacttttctgagtggctctttagaactcggccgaacgccgctcaaagctagtggcgcgtgtggcgtgtgctaatctcggtcgctggttaacgagaggagacaaaacggttacctggaagttgctaatcaccctatcttgcttttgttcccttgtgttttactcatacttttaccttgcaaagacgtgtgcatgatctgaacaacgtgttaatactagtagtactatccttttttaaaaaagatttcctggaaagtatcagttgctcccagaaagatcggttctgctattactctggcttttgcgacaaggctttgttgccgagattttctccgagcaattaggtgaggtaattaaataatctgtgttaagtgcagctagaactgcgactttgttacattgtttttggttcatcagtgtctcgcctaattagttatgaccaccaaaaacacagtcgttttcttttactaagtaggccagccagcaaggtgacatcgatcgttgaagccagcagcagcaaaagtctataagtcgagacacgcttgtttacatattggattagtccagtttctactttctagtcatctcgtcgactgactctatccaacgacgcgcgtgtaattgtgcctgcagcttcttcagacatcgtgccgagtccctttttgttcttcaggaaaacatcaaacaatttctggagctagcattagcgtgcatgtttgaatgtttcagttcacctaatcttgaatacgatgttcatgtaacattttcccccagctccttttcttctggttaattaataaagtatatggatcatgtagtaacagccactgtctattgctgcagaactaacaagaaaacgagtggtcattttgctgttctgaacaataaccagctggaaagttaagcatccgaacttgtgaagctaattcttaggcgatcgagcaaccagttaattggcaggttggcgacaagtactgtagtagtagccgaagccggctggccggcggcgtcggcatctcactatctcagggccctccatttttgacagaagatcagggcgaaagaacctagcgagtagttggtaacatacgcctcgttttttcgtttacgtttataattatcagtcaaaatttaaattttcaaccaatttaataaattttcaaccaatttaaagttagttgggtttttttatcgtagtttatttttcagtctttacttttaaatcactaaagaacatgtatataataattttattcataaattgttctttatgcaaatatactttttaacttatttctcgatgggattccgtttgcaaatatgcccaataccagggctcatgtttatttgacaacttgcatagagttgcagcgatgctttcaatttctttgtcgcgcctttcaaagagggcatagctttttttttattacagccgattccaggaagtacacgctcgacatatataatgggtgtgtttaagtttgattgaaattcgaacgatatgatggaaaagttggaagtttatgtgtttagtaaagttttgatgtgatagaaaagctgaaagtgtgaagaaaaagtttggaactaaacaaggcaaatatgttcttttccattttctatatcttgctgctgcaatgtactgtacgacactgtacatacagacacaatgtcgactataatgcgcccgctaggtcttgtaaaaagaaaaaaaaaaggctatatacatgtatgacgtgagaaaatttcaaagccttactggctacaccgtaaattggcatctaaactagctactcctttcatcttaaaataaataaaaaatatataaaatattatatatttaatactataaatattaacaaatcaattgttggctgccttcaacgcagcaaaactacgaaaaatgctttgcatcgacgtcaatcgacactgcatattttattactacaaacgtacgtacggcagctagcggccgacgaccatgacgattgaccatagattgacaaaatctaacgcgggatagatggaccacgagcacgagctacggagctaggctcggtggaatctcggagacgagagcaaccgatcgatcgagcaacgtacggttcactcgcacgccacgcgcgctgtgccgacatcatcgtttcatcaccggctggcagcacgctcgtcgtggccgccgcggagaaaagagctgccgcgccgccgcgcgcacgcgcgctgtaactttacgtaacgtggctagctactactatgaccgtttgcactcgatcggtttgtcccatgccttacatgagtataagattttaggggttattttgttcaatactttaacttgccagaccacactttagactgtcacacctctttaaccttgtgtttggtttattgccatagttatgacaagctacactttcttaccatcttatcctatatgtcatagactcaattctttgcctagctttgccacaagtgtggcttacaatttgtaggccacgaaaagcgtggtcagccacacttgcctaacattgtctaaagtgagttatggtaatgttacttaaaaaccaaacagcccctaaaggtatgttcggcacacctctagctatagctttatttcttttagagcggtagcccaggcaaacagttttagctctacctaaaatggaagcggagctgggtgaaacactatcacaagatgaactagagaggtgtagttaggtttaatcagctccacaactccactccacactcaactcctgaagctaaatttaagagttgaagttataccaaacataccctttaggaggggaattgaggagattgagaagatacgcaaaacgaggtggaccattagcacatcattaattcattattaactattttaaattttaaaaatggattcatatgatttttaaagcaacttttctatagcatttctttttacaaaaaatacaccgtttaatagttcgggaagcgtgcacgtggaaaacaactcacaatctcccactcttgaacaaagtagtggttggttgatagttagttctaaaagttgaaaaatgtgtttctcagcttttgacatatatattttttatgtgactacaaattttcagtatataaacgaaaatctgtagtatttggctacgtttgagatcggtggatagagtataaaagtttttcacacgcatgttcccgaactgctaaatggtacgtattttttcaaagttttatatataagaaagttgcttaaaaatatattaatttagtttaagtctaaaacaattaatagtttcgtaaaaaaactaatagttaattattctcatgctaatagctaatagcttatcttattttgtgtatattttcagtccttttattttctcttctctcaaacacatagatggaagagttaatttttttttagaaaaagctgcagttactatgaacttttttttagaaaaaactgtgtcctttgatctagagagagtttagagacatgggcgcgaccgcgcgagctggcggccgacgagcactgcgcggtgaacaagtgctggcccgtttggcttgccttcctgtggctggctggctgctatgcaaagccaaattacactgtctcggaatattagatatcttaaacgtgctagattcaccgcgagctcagccgatctacgccattgaattttacagaaaacccctcgtcgtttcggtatttcagactaggttcagctgatcagagccgttctttcccacgcgtgtatgaattctagttaactccaataggttgtactgatatagtatatattctttccaaaataagtgcagccgtgagtatcaatatccaacatttgaccgtccgtcttatttaaaaaatttatgaaaaaaactaaaaaaagatagtcacacataagagactattcatgctttattattatctaataataataaaaaactaatcattcaaaattaaagtttttttcaaataacgcgaaaagtcaaatgttgggtatgaatagtataaaattgaacttattttgggacggtgggagtataaactaaacattgtgttcattattatcttactattattctccatctgtttccttcccacagacccaatcaattcttaattatgtgcctagcccgttacacacttacaaaacacgagtattattactagtccataaaaaaaatagcaatatcaatatgttcctacgagtgcactttcaaatgctcggttaacctgaaattcagagggcttctcttttggcccaaaatgcaaaggcccaaatcagcttggagcccacgttgtcatttcactgaaggcccacacagaaacgcagcccaacaacatggcgcggtgccgtgcctttgccttccccaatattttggcgggagaattcgcttccattttgcgcccacccgaaaccccaaaacccgcacgagaaaaaaaggaaggggaaaatcgggctggagctggagccctagcggcggcggaggcggcggcgatggggcgcggcggcgggggacggtggacgaaggaggaggaggaggagctgaaggcggcgaagcgggggtaccgggaggcggtggcggaggggaaccgggaggaggaggcgcggtgggcgaacgtcatcggcgacatccacaagcggcggggggagtacgtggaggcgctccggtggctgcggatcgactacaaggtctccgtcaagtacctcccccagcgccacctcctcccctcctgccagtcgctcggcgaggtccacctccgcctcggcaacttctccgaggccctcacctaccaggttaccacgatccttccatttcgcatcgcacgcatatgatcagatcacgttttctgatgtctgagtcgttataggcaggtgtgggttaagttgtagaatttccgcattgagtttttggatttttttttggggtctgccggcaaacgaattgttgctagttacaacctgcgctatggtttctacggcgtaccttagcactgacgcaccactgtatcagggaattttgctcatctcaatgccactatgctttgggccatttggtgttgcatctgtatatgaatgatttagtcaagcatttgaatatttaactgaatatcagattaagctgcatacttcgatattatgctttactttggcaaacttatggtggacttttgcttgtagaaatgtacacaaatggtttgaatcatttgctggactatgcaaacattttatgttatggatttcagtatggccagtgttgagatttataatttatctgctgtttatttgtgtggtattaccaaaatgagaaaaaaatatttgtgaatcttgcactctttgtctgcatgtttggttagttggtgatcttaatcaatctggctcaggttcgcctatgggttttgtcccatatggttggtttagttgcatctaatttgcatgtaaacctttgaggagccaaccatgtgaatcagattacccttttatgtgaagtgagggggaatggctaattgttagcatgtgttgtatgcagggtttcccaaaccgccggggccggggttaccgcgcggtaatagtgaaaaaccgtaaaattcaaattattttttaaatttatttgaatttaaggaggttaccgcggtatttctattaccgtacccccgcagtaagggcggtaaccacggtaaccgcgcggttaccgacggtaatgtaaaccctggttgtgtgtactcaggcccgttatagacttaccagcacccctgttcaaatatgatcatttggagtaatttgttcactcaactcatggtattaagtgctgatctcctgtttcatgttgtctgttggttatttttctaacactcatcataatgctcttgttaacccaaagcagctgtatgttttttctattacatgaatccatatttctagttatcattgatgtttgatgcttcacagaagaagcacttacaacttgccaaggaggctgatgaccttgttgagcagcagagagctagcacccagcttggcagaacttactatgagatccttctaagatctgaaaatgatcacagtgccattcggaatgccaagaaatatttcaaatcatccatgaagctagcaagggttctaaaggagaatccatcgtctcagaagtctctcttcctaaaggagcttattgatgcgtacaataatatgggcatgcttgaactggaactggataattatgaagaagctgagaaattacttgttcagggtctgaagatatgtgaggaggaagaggtacaccagtatgacgatgctcgcagtaggctccatcacaatctaggtaatgtttatattgaactacgcaactggaatagagccaagggccatattgagaaggacatagagatatgtagaaaaatacgccatactcaaggcgaggcaaagggatttataaatctgggggaggtgcattcccgtgttcaaaagtatgaagatgcaaagctttgttacaataaagctcttcaaataacaaagtgcttggaagatgaggatgcactaatggaccaaatccatcagaatattgaaactgttaccaaagcagccaaagtacttgaggaaatgaagacagacgagcagaaactgaaaaagcttgtcagagacacatctaatgctcgtggaacatctaaagagaggaagctcctccttgagcagtatgcttggctggataatcttatggagaaggcaaggatgataactgcatggccaaaagtaagtgagggataactaactatgcgatctttagccacaaacattaactttaaagttggatctattttccgcttatgatgttattttattactgttttgttagaaaaagaacatgatcacgttattccattagttaatgcataaaggtgacttcctcagtcttttattgtgggggattgttgtgtgggtcagaagatagtctcttgttgctttgcctgatggaagtatcgatgttttgtgaagcttcttgttggacttagaacttaatatgcattaactaataaccatgtgtgttcagtgcttgcattattgaagtttcaactgtgctgaacttgttttgcaccaactcctttaccaatatgaacatatgtgctgactacatgtaggcttttgcctgcatttgcattgtactaagtatcaacatgaaatgctcagttattatttatttatattccatcgtagaacacaacaccgtgttgtaattgcacatgactgtctggttgagttttactctacataattgcttacaagtcttacaaatatttcagtagtcatcttgattcccgtgtgtcttgtcggacaactgagattaaccataaacttaattaactatagcatcctaagtgagtccagctacgattagtagaatctaatatataaagaaacaatagctcaattttgtagtgctgtcagctatgtttaatgtcaggttgtcggtgaaaggaaaatgctttagtaaattatcttatttggtcagagttgtttatgacaagaatcaacattgaatgatcaatgcaaaacttattacttatgtacacttgtacagtataggcaatgaatgatctttactttcctgtcacaccgacagtttgaaattggccatcattatcagagctagataaaactccacaatgcagagttttgtttggtgtattttttggtgttaggttttggaaaatgaattgttcatgtacttcttgagttctgggattgagattatagaacacatgaaaatgatgcgaaattatcaaaattaaaaaaagatcaggtcgaatatgaatatgcatacccccgaaatagacaaagcactaaggtgtgattgaagaagaacacatgtctcattctcatgtaatctattcgtttcccagctgaaggaattttcgaaaggacaaaagagggtagcaaatgaactccatgacaaggaaaaacagagcaactctcttttggtcataggagaatcttaccaaaagcttagaaacttcagcaaagctcgtaaatggtgcatgaaaagctggaatatgtatcgatcgatcggaaacttggaggtgagattacatgtccttaaattcatggacatgatgccatgcggcatgcttgctagttgctacctagtaataagactactttcctccttgcactcatttacttggagcttccagtttttgaatctttctcaccttggatatgtgcaactttagggtcaagcattagcaaaagtgaacattgggaatgttcttgattcttgtggtgactgggctggtgcgttgcaagcttatgaagaagcatacaggcaatgtctctatgccatgctcttgtaattccatatcaatattgtcctttgcctgcattcgtgtgatctatctgataatagttccagacttctactgagtgtatacaacttgccattggggcgttttaatgccacttttggattctgatacttgcttttaatggtattcagaatttctgtggaaggtggtctttcaaatgtgcaactagatgcccttgaaaacatgcattacagtcacatggtcagatttgataacattgaagaagcgaagtaagccactgagcacatactctgcacaaagaaagtacttattaaaacctgttctaaaatatattctataacttcaggaaactgcagcaagaaatagacagcctgaagagaatgtctgatcaacatgaagcaagggatacagttagtgactattgctcagaaactgaaagtgaagatggcaatgtatctgataatatcctcaatacagaggacaatgatgggaatattgcaaataatatttctgaggaatttgatgatgatgttgttcttgcctcacttgttcataaaagtaagtcatctaagaccaaagcatctaagatacatagtagtccgaagaatgttgatgagtcatgtgacatggatgggagccctgaagaagttgtaagtaaatcatttagcaaccattctggtagaaagcgtgttcgagttgtcatatcagatgatgaagctgaagaagctcctgaaattgatcagtcaaaaagaacacttactggtcgagcagatagtctgtctacctcaggtacatgcctcttgacttatgagcacaccatactttcagtagttgctgttggagcacaaaatatttttcttctaattgtgcgatacattttttctgtgtccaacagagcgaattgcaaatgcagcaaacagaaacagaaatcaggttatacaatacttaatcccttaaaactttgttattggaaggaatttaatatatgcattatttgcattacatcaattattctcattggttccattagatgttgacaagaacttactgttacaaaacactggaaactgataatcagtgttcatctgcagcatacctctcatcccattgagaccaaagaagtagacagtgtttgcactccctgccctgctgaggaaagtatatgttcattcaaatctggtagtcctgtttgtcatggtaatgatggcccagatttaggagcttctagcataggaaagttatctgtgtccaaaccagcagcgagtggttccaaggttggtacacatgcatcaaacagtcggccccaatgtcaaaatgctgttggtcttcaatcctcagatgctgatcatgtaagttttctttcaatcctgtcttcccatgctcatgaaaagcaggcaccaactgttctttcccattgcttttgttcctactaaaacactcctttagagaatccattatgaattccttggctgttaactttaaatgttcatgaagatgccaaaaatacattacaagagatgaatatgttaactgaacattttccgttctgataactaatattaattttcggaaggcatatttctttttggttgtgacatggaccagaggtttggatcaaataaaccttaggataagctaccgtatgtgtagctcaagctcactaacaaataccagcaaagaaatcagccgctggtggatcattggcatgtggacctaccttcaaaagatactgctactaccgtctatgtgtatcacttttctaccattttggatggaccccacatgtcaacctctatcaagttattttggaattagcttcatacaatgctcatatcatatttgagtcaagtagtcaacctaggattaatgttccgtcagtaaacagcgagacgaatttattaagcctaattaatctgtcattagcaaatgtttactgtagcaccacattgtcaaatcaagaagcagttaggcttaaaagattcgtctcgcaaattagtcacctaaatgttccctttctctcaatattgaagttacgtttcaaatgatttatccatggttctagtcacgttatcattgattatgacagttattccagtgattgaaatatgattgatcctaatgtgcagaagttctgggtgttcaaaattggtgaacttttggtttacttggatgcaaatgcatgtacatgtgagggtgcctttagcattgagtgtcttaaagttgaagtggcatgcgtgtactatcttcagattcctgatgagaagaggtccaaaggtttgtctccttagtttcagtaaattacatggtgtgtccatttaataactgtgaactatcattagaattgggatcaaattcgcaattcagtgatttcgctgttgctgttctcatcagtgaaatagaacatagtttcttcattttaatttaaattgtggtaggtggagggttgtaaaacttatttaaagctgtttccatgtcattataattactgtgcagtcttaattgttgaaagaatgtagaatgccaatagtgtgtcattgcctttttccattaactcttatgagttatgtttatgggtttactccatgattacttcagctatgtctataaataatgcatgcctagtgtgatgcaggagacagttgtgctggcttagtttctacgttacttgcagtttcatattattcgggaactacttttttcttttctgttggaactgacattaatcttgctttgctaggtttgttgcctattattggggaactcaagtgttgtgggaaggtactagatgacacggactcacgagattatattgatcaacttgcctctgaacagaagtgcattgatgttgttattgatggtatggttgccctgtagtcatctgtgttgataaaactgctattattgcatcaatgctattattggtaatcactctgatttttccttctttattgatgacatgtaatatgctgttatgcattgaaggacatcaagtcattgattgaactgagtacagtacaatatcagtgtggtttgttcttcatgctactaacccactacagtgggtttcatttttttaaggaagacacaaaagatttgtgtataattgcattaaggagaaaagttactgcattgggattcagaagagattgcccaataaacagaatagcagaaatctctggcaaactactgtttatcttaacttcagaatccttcctatcctatcattacataaaatgattattactagtaaaaaagggatcaatcatgctggtttactgtctttattaaatactagtataatattaatagctaattttagcatcaaatcttcaaaacaagctcctcatatgaactcactaattgaggctttcaacttctctgctcaaaatcaagtattagagttgttactgctttttttttttgcattatatatgtgtttttaaatgctgatggtgtgcatatgtttattgcatggtgataccattttaggtccgtatatggactaaactccatatataggtgcttggtttcatgggtaaactctctgttgcattccaatgcgtcgcactgaagtgtaatgtacatatttcctatagttatacctcatctaatataccatgtttataatgaagattgggtgccaaagcggctgatgaaattgtatgttgatttctgcacaaagttatcagaagcgccaaataagaagctcttaaagaaattatataatcttgaagtaagtttgttagatttgtatcattcatatttgattgacaatattataaagtggcttattatttttgaagagtcaaagtgttcatgcctttctattttttgacaggtctccgaagacgaggttattgtgtctgattgtggactccaagacctgtcgatcacaccttttcttgatgctctaagattacataaaacaatagctgtgttggatctttcccataatatgctaggtatgctttttccaatatatctctttcttttcctagtttgtcttatcttatgtaatctacgcaccaatgatttggtggcatcgcagaaagccagttcaagctaaatgtgtgtgtaccatattaattcctctatgcttttacaatgactaaagtttatgttcacgaactgcaggaaaccaaacaattgagaggcttcaacaaatattttcttcatcaagccaaacatatggtggcttgacactggatttacattgtaatcgatttggtccaactgctttatttcaggtctttttactatccctaaacttgtttatcaaagtgaaactacaagttatttctgcttttgaaagctcaaaaaaattgaacattaaaatggactggatcctcttctacaataaaaaggaaaacttgactcttggggagagatgtcccataatgcttttaacaaggccgagaaaggcccgaacgacacgcagtccttacgtctactagtgttcctggaagaatttcagccgaaaaccaatttaacttgtgatatctctctttagtcttactgtgtgagaaatttagatcactagaagctatactctattacttactttagagtttagactcaacgggaatgtgctataacaagtgctggttgattttctgcattgagattggatgtccctcttagtcgcaaatctcaatgatcctgttaaaactaactgaaaccatttggatggttctaattccatactctgatgaaactggagggttgaccctttaccagaacaaattattctatcgttgcctatcggaccaaaataagctgtcttgctttcaggcacacgttcattttaggaacagaattctgaaatcatttactccttatttactgatacagatatgtgagtgcgctgttatgactaatcgattggaagtacttaatctgtctgggaatcgcctcacagatgcatgcggttcttaccttttcacaatcctacagaagtgcaaaggtaggtactgtttatggcattttctgtgtttttgccagccatatttttctttaatggcaccaacctttaatttcctcttatagaatgtgtgctctgtttacatatcgtaacagcactgtacagcttgaatgtcgagcaatgttctatcacatcaagaacagttcagaagatggcagatgcactgcatgaagggtctgccctttcacatctctccttaggtacttttattactcctgctctgcatagttaaaaactatcagatatgtttcatgtacagcattcttatgtttcaaactttcatatttttgacaggaaacaacaatccaatttctggaaatacaatgcttagccttctctccaaacttgcctctctgaaaaggttcgcaaacatttgttcaatcattgttgatacctattaggaatagatgtgcagtgaaataatggatgagccatatatctcatcactgcaggttttcagaactaagcctgactggtataaaactgagtaagttaatggttgataagctgtgtgtacttgcacaatcctcatgcttatcaggatttctgctaggtggaacttacattggatcagtgagtctgcttcccacgcattttttttagaaaatggattaaaatccggcctctacatccacaatggatgtacacagccctgcttcccacgcatggttagtattttcagattatacaaataacattcttcttatctgtgaagatttttttttttgtagggaggggcaactaagcttactgaggcactctcttgtgcatcacaagaattgctgagattggatttatcaaactgtgggcttacaactcctgatttctcgcaactctgtacaaatctttctcaaattaatatcgttgacttgaaccttggaggcaattcttttaccctagaggtttccttcctattctcgaatgccttgatacacttatacatattctggtaaacttggtcgactaaattatgctgtatacggcgcaggaatgtgatgctattagggcattgctttcgaatccccaatgcagtctcagatctctcacccttgatagatgcaatcttgggcttgctggcaccgtgggcattattcaagcactagcaggtgaggaacaactactacataaaaaccaacaagtatggaagcttatgcatcaacctcaatagtctcctgctactttcaggaaatgaccaattggaggaactacgcgttgctgagaacacaaacctggcactacagagaacattgcagtacgatgaagacgcgcaggatgtatcaccaggtactgaccaaaaccaacgtaccaatgctgaagcgaacgatcacatagaccctgataagatggaggtgccggatagcgaagacgaagaggcagtccacgaggacacccgtgcagcgaccggcccagacgggagctgtgcaagttcatgccagagaaactcctcttctggctgtcatgccatccaagaactcgctgatgccatcatttctgcaaagcaactgaaggtgctcgatctcagtcggaacgggttgtcggaagaggatatccagtcactgtattctgcttgggcttctggccctagaggtgatggaatggctcggaaacatgtagccaaggaggtggtgcattttgcagtggatgggatgaattgctgcggcctgaagccctgctgcagaagagacttgcagatgtagtaaacctggtcgacctccccaagcaccaggttagagttgctctctggaaatattattattaccacagtaaattaactagggttcgtcagtgtaattccggggctctgtccaaacagagatgaattaatgggaacttgtgtttcatcagaggtgtaaatagcggccgattttcgggtgtaaataaaattatggtactcctatttgcttattactattatctttcatctctgtttaaagccacatgcaattttataaatataaaatataacaatgttattagtgttttcaataaccacatgatgaagccaacttcattactgcgtaaaatgcctcagtcgtacactatttggtgatcaaaataaatcgactactagtatttgttttgtgtaccacatcaccagataaggatttgtcggttctccaaataggatagtgatattattaaaaactatgaagataatgtccacgatgggacagctggtcccacggcccaaaaggatacaagataagccgaaacattactttctactctaacaaaagaacaatgctaaatgaacactacaatgtttgtgccgagttgttaacaccataatatgccatgccaatctttgaaccccttttttgctattcttagttttcaccagaaaaaggaaccttataatcatgttacacaatgtccactagacaggattcacaatgcaataaagtgaccacaaatcttcaatttgttagcatcacttgtggatatagcaacattgcatataaaaattgccatcttgctcagcatcagcaaacagaccaatagaaatccccaataatacacgctaggcaccaagaagtcaaaatccaatggatccatcattgaaaagcttgccctctatgcaactagttcaccacccttctccttcccaaactagcaaggccatgaaccaaatggcggcaatgagctcttgccatcacctttcttcctccatttccaccccaagatttggcacaaggaaggcaaccatggccaagttcgtcagagctccagtgcacagctgcagctgcagcaatgctcacctctcccaaactgcagcacctgccaagatggtaagtacagccaacttaattagctgatgcaactgttgctaaatggttcatggtttttacacaagattatgctgtgctgtgattgttcaggtatttgaagaccaggtgagaggagtggtatgttacagagatgataaggggaatatgatctgcgaagggtacgatgaagggcctaggcttggcatgcggctgccggagaaggcctgcttcccatggtgctggcaaacactttgcttgatttaccatttatttcagaaaaaaagattgatatcgtactagagtttctgatcaaacttactattgtgctgtcaattctgtgatgcaggcctatgggggttcaagtcaccgatttcatcgagctgtcgacgcttcgagttttcgaagacgtcgattctctgcagcccaggaaagatcagaaggggaagctctgaaataaggtttctgaaattcagacatacaaggcctaagaattgctacatgaataagctgaaactctatccattttcatatatactcattatcatttcttgctgataaatgagttttagtattgttcgtctcaattatcaactggatccttctgtattccttcagcacaatgctagaacatcgagtttctgtgattgtttcaatttggtgtagaatcctttatacataaagaaccattccaattaacctcaacacatccagaaacattgtaatctgaaacatgcataacatcaagtagaacacataaaaataccggagcaaataaaaattactagttaacaacatgcaatttagctccaagttaattaatcaggtgatacagagaacagaacacaacaccatcttcatttttttctttttcgctactagtacgccactacagacctgaagtgtaggtaactccagtggcaggtagccacgcatccccaacgataaagtttgccacggtgaacctcgtggcgtccgacgtggacatcgacgtgtgcacgccgctccacgtcacccgccgacgtgtccccgcgccaggcccggtgttgccgtactcgccatagtagagcgtgctgagcccgaactggcccgaccactcgagccacccggccggtgcgatcgaacggtccaggaacgtccccatcacgaccgtccgtgagtacctccgccacggacggcccagatacaccggcgtgccgccgaggtccggcgcgccggtgatccggcaccgatggatagagatgccggtgttctggttcgggtcggaccggccctgggccgtgacggtgtcctcctggcccgggctgggccgccgggcccggatctcgcagccctggatgaccgccgcggcgttgccgaagatgaagtccaccgtgccggagatgtcgtcggcggcgtagaactgccggttggagtgcacgtagagcgtgtcctggtacgcctcaatgccgcaattgtacacgacagagaggtcgccgccgacgcgcagcgccaccgcctggcccttccccggcccggcactgttcacgatcgtcaggcccttggctataaaccccgaccccattgcagctgcacaaataatcaccaattcactattgttataattcagttaattgattatatccatttctactactctactagtacaaaatgagatatttctgcttgtgaaatttgatcatgggagtgtagtgtacagcacacaccggcaaaaaaaaaaaaagaaaaaaaaagagaaaaggtgatggcaattggcaagtgcaacatcgctgtcgttagcatttggacggttgaggattaatttcgacgagattggcgatcattaaaggctataaaaagtgtgcgcatctaacgactagatcgatcgaactattaactgtcatgcatgcatgggcatctctgcatgcatggaatggaagatatctggacaccacgcacgtacgtacgtacgacgatccatatcgtccatggtggcgcgtcgtgtcgacgtgagtagtgggaagggtacgcaccgacggtggcggaggcgtaggtggtgtagccgccggcgacgctccggtggccggagatgaccgtcttccccttgccgtcgccgagcagcatcacgtccttctgcttgctcgtgatgctcacgctctcctcgtacctcccagccttcacgtagatcacctttcggctccgtccgccgccgccgccgccgctcgccgtggggtggtgcgccggcggcggcggcgcggtcacggcggcgatcgcgtcgctgatgctcgtgtgcgtcccgctgccgtcgagggccaccacggcgtccggcgcgatggtgctcgccggggatgagaggaggtgcctgtcgtgcttggtgacccaggatgggaacgcggcgcggctcggcggcgccggcgaggagctcccgctgccgccattgttgagcttggcgtggagagccagcgccgtgccgatgaactgctcgagcgcggcgacccgggcgcgtacggcggagcgcgccgcggggtcgggaacggcggcgaggctgtcgccgcacgtgccctggttcgtcagcgcggcgctgagccacgtcgtcacgccggccgcgtccgcggcgcgcgcggcgagcgcgtcgtggagctggtcgaggctgatgtcgagcagctcggcgcagtcgtccatgccgctcggcgccacgcgtggcctcgacgacgacgccgacaggttgcgcgccagcgcgcgcgccgactcggcgcgggtcatcgcgaactgcaccgacgccgcgaacgggtcgttggccgcgccccgcgccgccgccgacgagagcgccgtctcgcacgcgctcgggtacggcgtcgccatgcagatggccgtgacgttcacgctcgacgccgccgccgccgccgaggcggcaatcctcgggacgacggccacattgtccttcgccgccgccgtgtcgccgtggttggcagcgacagccgccaccggtgtcgctagagctagcgccattgcaatggcattgcaccatgcaaggacggccactctcctcctcctcccaagcgtttccatgtccttagcttgatgcgtgtgtagatgcatgggtgcaatgtacaagcacatcaccaatggctttatagagtataagtacacaaatgtggccttgctagtggcgtcaataatgcattagacgcgaatattggagaatgacctaatattaaataattagaatgggtgaggcttcgaacccaaatcgtctaacccaccaccttgtgaagctagccggaagaaccctaggcgtttctcataatgcattatgaatcaaccttatacaactttttaaataaagtactaacaagttcagtgattaagtttctggtgcataactcgattaaaatttgatcaaacaacacttgtcagaaaattttcacaatcttggtaaaagcttcactgataatcagtgataataagtcatgtttcttcagagataattagtgagtgctaatcctcctagcaagatatgaagatagaacattgcatggttgagctgtgggcaatgcaatgcaaggtcagctttgcaaagaggcatctggcaatgcagagcacatggagagctggaaacaagcatggagcaaaggaaatggtcctggactcctgattaatggataaaggagtaaatgttcgcacaaaaacggtgcactctaacaagacagaaaaaagtgaaaggttaataagggagaaaaaagcagataaagatttgtttctgtcctcttgtccttactgacattctgtttctgtttgcagaaactttttgttctgttagtgtgtgaggatttgttagtctgaagatctggtttaccacacgattctgatcttttttctaatgtgatttgggttctaattagatgacttgattgactgatcttgacatgatgcttgatcttgctcctatctgatgactggattaactgggtgagttgttggagtttttcttcaacaatgttctgtacaatacctgcattttacatgaacatttatcaataatcagaagagatgcccagatagtcataggggcagctcatcatggctgtctaactttgcttctgattagaaataaagatcaccacaagctgctgaagtgcattcagatacaagacgcatcagtgctatgagcaccgatgctttacctaagagccctatgatgctttgtgcgaacttctgccaacgaagctgtctgcatcgttgcttttcctacaaatgctttgaacagtcactggcacagagctcattctgtgcaaaaggacagctcaactccctcacatttagctagggaaggcaggtagaggtggtatcaggttcagagtgatttccagtactgaagtgaactctctatctatctgtaatgacattcagattggcaacaaaaccatagacactgaaatgtggttatgtggaacacaatgtaagctgtacacaccgtgctagtaataagttcattaggcaatacttttctcagcagttgaattacagacagtaaatagtctacaggctacaaaaatctgaatcctatgttgggatcatatggtgtcctagagtaaaatttcagtgaacaggatttttcatcactggcacattatctccactctaccacagctactctttgatctcctaccaaaactggtctacgaatctccagctttcgcctcaagtcgcacataaccaaagccagaggctgtcacggagtacatctgctacctttgttaatcccttcgagctgttgcttaggccagcactccaatgacctctgttggtgtgagaatgttccattaacgccaaagcctttttcatcttgcagttgaggatgcctgcgtggttagcgaatttcagtttgcaaatgcaaataaccaggcagctatttaccgataatgatggtatagccttgaagtcatgaacaaaatgaagcaaataattagaatcgacatcaacaatttttatagattactcatatttatgattagtttctaagtgggtataaataacagaggacgtattctatcacaaattcatttgagaagcttacttggaaagtgaaagtctcactgtgtctcaaagatagcctctaaagtgtgttgacgacttgatgctagagatttaaatttatctcctagtctgccattttattagttttgcagaaaagggtatgattacttgcacattcctgattacaactcattatcttttcatttttacttccctgttatagcccctctacttctagcttattggagtagccattgatgcaatatcttgcagctactaatgctgagcaaaatatacaagatcagatggccgttcctcgtcactaatcaggcatgaataataacagtttcagtaagtatacttcaatcccttgcagtcggttttagttatcagggctatactagatggtatttgacatagaaaacatagaaaattagaactcacttgcgtgcatgatgctgtcaggagcacatcacgaaagatctttgggattatcctccaccaaatctggaacaaaaatggccagtttttttttaatcttgtgaatgttcacaaagtactaatatgctgcagcttttttcaaagaaagacaagaagaagaaactacactcactagagcatgactgttcgtctatatagcacctcatcgtcactttccgcattatcatcatccgacactaactggctgcctggcatctgaagcttccctcccattgtaaaggagggtcctggtgcatcgccttcaataaaatcccctctcattctttcctcaaatctctgatcactgcagtttaggaaccaatccaagctgcatctaatccccttagttgaaactctcatgtacctaggcttgatccttgactccaaactgtaagtaaaatactcagggtaatctaacaattcacttattgggcgcttcatctcgctcttgaagaagtaaagactgttcttcatgagctccatccgaagcaacaaaatctgagggcatcgaaccaccatccgcgcaacatcctcattactaatccctcgcccacggagaaactccaccagcttcagtatgatattctgatgcaaacttacaagctgcggcaatttctcaatagcacaggcaaacgcatcagggtcaatttggagcttcaagttgaagaagtactgctgggctgctaacttcgttttcagcggtaatccaagaataggcggatactgcgcaatcaccagcggcaacatctcctttcgaatgccaaagctgagcaatgcctccacatttggcttgaccgtctcctcaagatcatagccaagaatgtatggccgcttctcgagaatcctcgcgaggatccgcattggcagcccgagagaagtgatgtactcgcacagaggcttgatggtggtgcccacgcgcatgccgaggaagaaagggaagtgcgtcaccatggggccgatgtcgcgcggcgccacgccgacgatgccgacgaggtacgcgacggaggtgctgatggtgccatcgggcttgaggccgaggatgtcagggtacctctcgaggacgcgggggaggtcctggcggtcgacgtcgaggccgcggagggacttgacgacgggggtgaggtcgacggcgacggaggcgtggaggcaggccgggtaggcgcggacgaaggcggcgaggcgcgcgcgcgtgacgccgagcttctcgaggtaggagaggacggggatggcgttcttgcggagggagcaggcgaggaggagcgggtaggcggagaggtcgtcggtggagaggccgaggcggaggaggaagtcgagccgctcctggagcacctcgagggaggaggggagctcgacggcctcgagctcgccggcggggtcggagacgccggcggagcggaggaagtcgagcgcgagcacgcgggagacgagccgctccttcctcccctggatcacgccccacgtcaccgacggcatctcgtactccggcggcggcgcggccgccttcgaggagagcggagcgagggggagaaggaggcgcccatcggccgcggcagggccgagcctacggagtgagcggacgaaggggagcatggctggcgccgcgccggcgagcggcggcggtggcggcggcggcggcgaggaggcagagagggctggagagtggtttgtgggattggtggggtttgcggcttcggtgtgtggtgatttgtacaaattcgacctagattaggggctaaattgcataaagtcaaaaaatggtcataataactgcatatattaggatccctaaggggcttaagtgaataagagcctattgattgcactaatacactaaagcctaaatttaaattttcaaacttttaagttgattttgatatattttcagtgtatctttttacattggtttttaagtcatataaaagttttaactataaattaatttatatttcttaataagatgttttaacttattaaggaaatatgggcatgaaaggtaccgatcctaaatagggtcctaaaggtctattcagattaaagcatatcattgtttgataaaattaacaaatatatgatgattttgttatcaaatagagtattggtcatccctagagaatttgacaacaacaagcttatcctacctaaatttaataatattgttaacttgctaaaattttagcaatattaaattttaaaaaggttaaaaatggctataaaatgaacaaacactgccgcatgaaaaatcaggatcgctaccatctgaaccaggtgccgattcgcataaatccagggcgaaattgggccggcatcgttggtcgtcctcctcatcatgggctcattcgcgacttacgggcggtgggctgggagaatgacaatatttccagcttttatggcctgcttgagcttggcgtgtgctgggccaatttcgttgatcgccgtggcgcgttggggagctgcaagcaggccatggcccagttataaatgtaaatacgatataattgcagtgtaactacatcgtggaaagtttgaaccgtcaaatttgcttgaagattcatgtaaacggggaaggaaaaattcacggtgtgcgtagttgtgagaggatttcgtccggagacgtccacttcacgaaaataggcgtgataccatggcatttttgaaagttacatatattttgttgttatattcaaattataatgtaagtacacttttttttccgggccggccaaagtttattaagagtgaaaatgtaaatacactattattatactatatttgtatatgttaaattttttgaagaaattttgtccataaatatttagacggctccgatttagttgcctaatgcaattggttgatactccttatttcaactcacttcaacagcaaccagcaagcaattcagcaaagtcgcttcaacatatgtgctgagcaagcagagttgcagtcttgcatctattcaagctctaagtaataaatatgttgatcctttaattacgtgcttccttttattactactacgtacttccttcgtcctaaaatcgttagtttttagttgcatataatatattatggagttaagtacagtgcggacgaatggaggacatttattttttttaaaaaaacaagatgaatctagttgttatgggcctcatcatttgcctaaagaaaaccagcagcgaggacggagaaggcacgagtgttgtgggttgagggcggtgcagcactttggcaatctcctgcgaccctgccaaatctttcgcctcccgcctttactcccgcgatctccaccgtgagttctggtatacactccctctaccgttagtccagacagttgggtagctagagaatgacgagaggagagagaaccaccaaatttagcttgtggagtgcttggtttagaggacataaaaaatgatgtttactctgatagagtactgttttttcacctccatacaccaaacacataatggatgaccggatagatgatctgcagggcatgctctaaccttatactctctccacctgtccaccattgaataaaccaatgttcggatatgggaagttgggaaccaaactccccgcacgaaaaacgtaacggtccattagcgcatgattaattaagtatttgctaattttttttttcaaaaacggatcaatatgatttttaagcaactttcgtatagaaactttttgcaaaaaaaatacaccgtttagtagtttgaaaagcgtgcgcgcggaaaatgagggaaaggggttaggaacatgggattgcaaacacacagccgagtcgccttttctccagccgttttcccacatgtttccgccttggctttctcgcctcttgatagccttcgagtttggaacatactacctccgtcccaaaataagtgtagccatagatatccatatttagcactttgaccatccgtcttatttgaaaattttataaaaaatattaaaaaaattagtcacacataaagtactatttatgttttatcatctaataacaataaaaatactaatcataatctttttttaaataagacgaacggtcaaatgttaaacatgaatattgctaaaattgcacttattttgggacggagggagtacaagttaggccctgtttagtttcatgggtgaaaaattttgacgagtcacatcggatatacggatacacatttgaaatattaaacatagtctaataacaaaataaattagagatttcacatgtaaactacgagatgaatttattaagcctaattaatccattagaaaatatttactgtagcaccatattatcaaatcatggcgtaattagacttaaaagatttatatcatgttaagttatacatatgagtttttttctatatttaataatttatgcatgtgtccaaacattcgatttgacaaggcgaaaagtttttcgtgagaactaaacagggcctcaatcgtccttgattttcggcgaaacgcgatatgagcaaagatatttaaaaatagatttatttgatatcttttaaaaataatttatataatataacttaacatgaaataatttttttagtggtacaacttatatacaatcagagacatgcaaacataaataatcaaagaaaaatatgttcatatgcattacaactatttatatttgttaattaaatttaagttgtgtgtattgaatagttgagtcgtatgtatagtaatttattgtaagaaataagaaaataggctttgcgagtggcactttagaactcagccgaacgccgctcaaagctagtggcgtgtgctaatctcggttgctggtcaacgagaggagacaaaacggtgaccctggaagatgctaatcaccctatcttacttttatcttcggctgtgttcggatataaggatggaaccgaaccctttcgcacggaaaacggaacgatttattagcgcgtgattaagtaagtattagctattttttttaaaatagattaatttaattttttaaataactttcgtatagaaacttgttagaaaaaatgtaccgtttagtagtttaaaaagcgtgtacgtagaaaacaagagagagggattgaaaatgtggggttgcaaacacagcctactagcagtactatcttcttttaaaagatttcctggaaagtatcagttgctcccagaaagatcggttctgctataattactctggcttttgcaacaaggctttgttgccaagattttctctgaacaattaagtggggtaattaaataatctgtgttaagtgtaactagaactgcgacttgttaattttaaaaaaaaagaactgcgacttgttacattgtttttggttctttacgccattcacaacccaatgactatgatgatgtctatagtattaaataagctgccacatagaataaaaagtgacgtgacaagtgaataaatgaggaaagagaaggaaatcatgtcttgcatgagacatggtttctacacaacatccaaaacatcatgtgagataagtagcattaaatttaagtatagaatagtggtgtttgtattggaagagtggtgtctagtactagtttcttgatgatgtagagtttatgaaaactatacctaatgttttggattgggaatggtattagtatctcgcctaattagttatgaccatcaaaacgacagtcgttttattttactaagtaggccaaccagcaaagtgacatcgatcgttgaagtcagcaacagcaaaagtctataagttaagacacgtttgtttacatattggagtactcggtttctagtcatctcgtcgactgactctatccaacgacgcgcgtgtaattgtgcctgcttcttaagacatcgtgccgcgagtccctttttgttcttcaggaaaacatcaaacaacttctggagctagcattagcatgcatgtttgaatgtttcagttcacctaatcttgaatacgagtttcatgaacatttccccccagctccttttcttctggtcaattaatatgcatcacgtagtaacagccactgtgtactgctgcagaattaacaagaaaacgagttgtcattttgctgttctgaacaatgaccaggaaagttaagccattcgaacttgtgaagctaagatgtgttgagttgtgatccaaatttatttgcacttaataaagatctgtcggagcgaattgggggccctgccggaggctgggccggagcggagcgggggtgtgggggcagagcccccgcggtacggatcgtaataccttttagggtttcacctcatatatatcatatatatacctcttgtaacccaccgtacgacgttgtaacctcagtgaaggtattttgctagctggtgcccgtagttttttctctcctgctttggagggtttttcacgttaaatctcatgtcttatgtgattgatctattattttttatcgttttgactatcgttttctaacaagaggctcatcgattgtctgtattccctaacaagtcctttcggcttattagagaataaaaaataatttataggtaaaacttttatatatttgttcgtagcgacttaaaaactaataattcaaagaaattatgttgaaaatatcaacttcaaaaccaagttaaaaatttaaattttagcttttactttaacttgttaggctaaccgacgggctctaatcccttcttactataaagttattataacccactaactacaattaagatctaaaactcaaacctcaatgtgccacatcatcgttaatgctcagccattggatcaatatatttaatcatctctgaaccgttggatgaaaaaatatagcccaatccatctcgcatacagtcaccacgtgaggcccatatatatttttcaccacgggagggctatctaatttgatcgtggcccaattcaatagtgatggatttttataccactttaatttatcaaaagcaaccatcaatctcaaataaaatatattccactgtaacacgcggggtttcaactgttcttaggcgatcgtgcaatcagttaattggcaggttggcaacaagtaatgtagtagccgtctggccggcggcgtcgacatctcactatctcagggccctccatttttgacagaagatcagggcgaaagaaccttagcaacatcattggtacttccttcgtttcaggttataagatattttgactttggataaagtcaaactattttaaattcgactaaatttatagataaatatagtaatatttataatactaaattagtttcattaaatcaataattaaatatattttcataataaatttatcttgggttgaaaatattattattattttttctataaacttggttaaatttaaaataatttgactttgaccaaaatcaaaacatcttgtaacctgaaatggagggagtagcatatactcctatatttagggctcatattaatttgacaacttgcatagagttgcagggatgcgttcgatttgtttgttgcgcctttaaaagagggcatagccttttttactacggttgatttcaggaagtacacactcaacacatataatattttctttttcattttctatctcgtgctactgcaatgtattgtagataaagatagctaatgagatgaaagctttctccacttatatattatattttttgcttttctacaactaatataagactatttgcgcgcgctagttttttgtaaaaaatgaaaaaaaaagctatatacacatacgacgtaagaaaatttcaaagtcttactagctagcaccataaattggcacacaataacatagccagttatattagctacttctttcgtatcgaaaataaataaatctaatataaaatattatatattttaatattataaatctgatatcgtggttggctgccttgaacgcagcaaaattacgaaaattgcatgcatcgtcgtcaatggacactacatattttcttactacaaacgtacgtacggcagcgagcggccgacgaccacgacgattgaccatagatagacgatagacaaaatctaacgcgggatagatgggccatggttagctgggtggaatctcggagactagagcaacggttcaccgttcgcacgccacggcgccacgctgtgccgacatcaccggctgcacgcacgtcgcgggcttgtcgtggccgccgcggagaaaagaagctgccgcggcgccgcgcacgcgcgctgtaactttacgtaacgtggctagctactacactactactatgaccgtttgcattgcattcggttggttgatcccatgcttttgtatggacctgtggctctattatactacctccgtttcttaatataaggaattttaacatattacttgcactgttcggtcactcatcttattcaaaaaatttacacaaatataaaaatatgaaagttgtgcttaaaatactttggataataaagtaagtcataaataaaataaataataattctaaaattttttaaataaaacaaatggttaaacagtgtaagtaaaatattaaaatcttttatattagaggacggagggggtatgatgagtacaactttaagtagcagttggttggttgatggttagtttctacaaataaaaggaaatgtgcttctgagattttgatttctaatttacatttttattatgtagcgacaaatgtagagaggaagattttttttaaaagaaaaatctgcagttgctttaaacttttctacactgtttcctttgattaaagagacatggtgtcagggttacgggttaggtataccctttacccttcgatatacgtcacatatcgatatggcatgcccgcgcatatagggacattctctatacatgttaaggaaatccttcacggaattggcagatggaaagagacctactcgggcaagactgggttgatgagaatgttgcaaaccttctaggcccgggagagtaggcgtgggtgtgttggtttgcagtagaatgagctgcagactcccagtgttatttcaaccttaagttccatcgacttaagcgtaagcgccccacctctcttttgagagtgcgagagatttccggtatcgtgtgcggttcgatgtctccgagtcctgcttggagaccgcctgacctacgatataaaagggaccccctgggaggacctgcgggatcgaatcttacagccaacgccaccaccacagcctacgaagtcggagcctgcaggagccgaatcgctgggaggtctagtcgaatcaactcgattacgatctcgccggtttcatcgagttccattgtttcctttgtaacctgtgattcccatcatataattccataccaactggattagcgctattacctgtcaaggggcctaaaccagtataatcttcgtcttctgtttgcttgatgtcgtactacgtagacccttgcatcaacgtaccccaatactctctatatccggtctacgggtatcacccgtcgacagtggcgcgccaggtagggggacttggtgctcaaggttctactactatgtcatccagcctcgtcgacaacagcgtcaacaccaacctcaactacgggcttcctgcctcaacgatgctagcgtggacttaagtcggcgaaattgtctttccggtttacaccacaatgccgatctcagctgagccatcgatgaccagaaacgagaacgcagtggctataacccaagacgactccacgtcgaaaggtcctcctgccgaagcggagaacagaacatcgacgatatccgagctcgagaaggattctaatgcggccaaaccttgtcgttccgacaagaaacacaagccgacaagaataacttccgaagcgacagggtcctggtgccctatccacaaaaccaggaaacatactttgcaagcctgctgggttttcctcaacgcccgcgccgagattcgcgcatgcaaagagcgtggaattcagcgtgtttctccaactcgtggtgtctattgtcctattcacaagacaaagaatcatgacctctcaagctgtaaagtttttctcagcgtcacaaatatgtcatctcctaaggtccagtagccaggcaagacccttagaggcgaagacaaagaatgaggaacgacgctgaccccaaatcgtttcgtcggtgttatcgacatcggttctcccgaaccgtcagtcctacatctactcaaggactacgactcctagtcaacaagtacgccacgcgaggtattggctatcgacgggacaaacacatcagcacgcgctaacaccgaggcggaaaatcaaacgactacaccggctcagcacatcaggaccctcaatgcaatactgagggaaaccccttatgaccccgttctaaacgatgatctcgcacaatggacagaacgattatgggaatcagtgaccaacctcagcaacgcgttcgaagaggccgttgctgcatcccacccggaacaacaaccaactggtggtatcaacggtgaaaaccccgaacagcgggaatcaccccatcaagctagccctccacctcgcggcaccagcgatctccgtgatcacctaaacggccgccgagaggctcgtcgcacacgggaaaacgagaattgttcctatcatcacgtctcttcacgacgtcacgacaatgaagaacgaggaggccgttcgaacgaagaccgagaccgtgatcaccgccacaaccgccatattcacgacgatcgtgaacgaaggacgccgggcgataccagtcgaggacaccgccataatgacgaagatgacagagatcggtgccgggacaacaatggaggacgatgacagggctctcgagaacccggtcggcgttctcgtaatccttcaccgggaccaagcgacccatcgtcgtcctcatcttcttcctcctcctcatcgtcagacagacatccacgaaggacatacgatcgccgacaacccattgcccccagtgctgggtgtagggctttcagtcattcgttgcgcgatgtccgatggcctgagaggttccgaccgggagcaatagagaagtacgatgggagcactgacccagaagaatttctttaagtctactccacagtactctatgctgccggagcggacgacaacgcgttggcgaattatttgccaactgcgttaaaaggctctgcgcgttcatggttgatgcaccttccgccctactcgatttcttcgtgggcagacctatggcagcagttcgtcgccaacttccagggaacttacaagcgccacgcgatcgaagacgacttacacgcattgacacagaactcgggtgaatccttgagggaatatgttgggcactttaatgagtgcagaaatacaatccccgaaatcaccgacgcttctgtaattcgcgccttcaagtctagtgttagagatcgctacactacccaggagttagcaacgaggcacatcacaactactcggagactattcgagattgttgagcgatgcgcccacgttgacgatgcgcttagacgcaagaacgacaagccaaagaccgggggcgagaagaaaccagccacggagacacctgagtcaagcaaaaagaaaaatcgcaagaatgcgaaaaggaaagctcaagcagaagttctcgcagcagaatatgctaaccctcccaaacgcccagacccacaaggtagcgacgcgaggaaagcatggtgtcccatacacaagtcgaacagacattctttggaagactgccttgttttcaaaaaaatcgctcgagaagcacatgacattggaacaaggcaagcgagtacgcgtggtcgagaaggatgcggagatgactgctcaggaatcggactcagcatatctagactctgacctccacgtctcacatatttttggaggttccacagcgtactcctcaaagcgagagtataaaaaagtggagcgagaagtctgctcgacatggcagggggctgcacccaagatgaagtggtctaaacagaagatagaattttcggaagaagaccatcccaagactgctgtcatcccaggacgctatccgatcgtggtcgaacccactattcggaacatcaaggtcgcgcgggttctcatcgacggtggcagctcaatcaaccttctcttcgccagcaccttggacgccatgggcatcccacgaagcgagttgacgcccaccgatcaacccttccatggaattactccccagtcttcgtccaaaccaatgggcaaaattacgttgcctgtgactttcagccaagcaaacaacttccgaacagagtagatcacatttgatgtcgctgaattcgatacagcatataacgccatcatcgggagaactgcacttgcgaagttcatggccgcatctcactacgcggatcaagtgctcaagatgccgggaccaaagggaacaatcactattcaagggaacgcaaagctggcggtacaatgcgacaagcggagcctcgacatggtcgagcaaacaccaagtccacccgccacaactgagccacccaagaaaatgagcaagacaaacaagacgccgaaaccgaacggcgcgatcaagaccgttccactctctagtgccaaccccgacaagaccgtcaagatcggggcatcactaaacgagaaataggaactcgcgctcatcaccttcctccgcgacaatgctgacgtgttcgcttggcagccgtccgacatgccgggggtccccagggaggtgatcgagcacaaactcatggtgcgacccgatgccaagccagtaaagcaaagactgcagagatttgcaccagaccgaagacaagccatacgagaagaactcgacaaacttctcaaggctggctttatcagagaagtacttcatccagagtggctagccaatccggtaatggtgcagaaggccaacgggaaatggagaatgtgtgtcgacttcactgacctcaacaaggcgtgtcccaaggatcacttccctcttcctcgaatagaccaactggtggactcaacagccggctgtgagctgttgagtttcctcgacgcttactccggctaccaccaaatcagcatggcgagagaagacgaagagaagacagcattcatcacgccgttcggggtattttgctatgttaagatgccattcggactcataaccgctgggaatactttccagcgcacggtccagggcgcacttagcaaccagcttggcaacaacgtcgaggcatacgtcgacgacattgttgtcaagaccaagaaaagcgactcattgattgacgatctacgggaaacgttcgacaacctccgacaatatcgcctcatgctcaacccacagaagtgcaccttcggagtaccgtcgggcaagttgctcggcttcctcgtctctggcagaggaatagaagcgaatcccgagaagattaaggcaatcgagaacatgaagtcgcccgcaagactcaaggaagtacaaagctaaccggatgaatggcagcactaagcaggttcgtagctaggatgggagaacgaggacaacccttctttgctcagctaaagaagcaagataaatttgtatggacataggaagccgaagaggaatttattgcactcaagcgctacctatcaaatccccatgtactcgtcgctccccaacctaatgaagaattatttctttatattgccgtcacgccatactccgtcagcactgtcattgttgtcgagagagagaaagtccaacgactagtctactatgtcagcgaagctctccatgacgcaaagaccagatatccacagttccaaaagctgctctacgcggtaatcatgacatcaagaacgctatgccactactttcaagcctacagagtcacagttgtctcctccttccctctcggtgaagtcgtgagaaataaagacgttgtcggccgcattgcaaaatgggtagtcgagctaagtcagtttgatgtccactttgtaccacgaacaaccatcaaatcccaggtactcgccgattttgtagccgactggactatgcctgataaccaatcaggcaaccagatcgacaacgaaacgtggataatggcgttcgatggtgcactcaacagccaaggagcagggacaggattcatcttgacatctccttctggagatcagttcaagcacgcaatccacctcaacttcagggcgaccaacaacacagccgagtacgaaggactactcgctgggataagagcagcagctgaacttggggtcaaacgactgatcgtgaaatgggactccgagctagtcgccaaccaggtacacaaagattataaatgctctaaccccgagttatccaagtacctcgtataccgcaagaacaacatcgagccagacgacctagcacgacatgcgtccaggcgagaacctcttgagcctggcacctttctggacatcctgacaaagccatcagtgaaagaggccatcagcgagattaacatagccgcccccgacatcagctcggaggtcacagaggcggaacgcgccaccgccgatatcgagaccacagatgactggcgcaccccactgatcaaattcatcaacagcgaagagttgcctgaggacgacgcagaggccgagaaaataacctgtaaagcaaaaatttactgtatgatcggcaacgatctatacaagaaagcgccaaacagagtacttctcaaatgcgtctcgtctgacgacggcagacacctcctcctcgatatacatgaaggaatctatgggtcacatgccgccggtcgcacattggtcgggaaagcttttcgacaagggtttttctggccaaccgccctcaaagacacatgcgacatggtccagcggtgtgaagcctgtcaattccatagcaagcacacaaagctacctgcacaagcgctccagaccgataaggccttgtcggattctgtagagacgaaagaccatgtcagacctggtcgtgtaagagttctccccttgcgtattaaccaagccgcgtaatcggaaatgaactttccaacttcgcggctgggggctaggatcagtgcttgttcaaccggttcaaccgaggcaggtcaaaggtccaagagccttgtccttcgagaagaatcctccgacgacaaggctgggggctagggagagtgtacaaatcaaacgactggccaaagtcgggaactgaagaggcactcttacacactacatccagagtaagaaggactcattaagatagatttcttttctatttcataagatacttcttacaatttcacacaggtccaaaaccatattacacttttccctaagatgtctatcacaaggtacaaaggctactaggaaggccaacgccagtccatcgactggaaaactttctccgccagcggcaccatcgacttcgccaggccatctatctccgtaggagtcctccgagaacgtgaaaaaccttcgcggaggacctcgaggtgcagctgcggacggtgatctcgtatacaggccaacacgtgtcccccggcataccggcttgagcgacgacactcctgcttcaaggcctcgtcgatgcgttgaccaatgccctcaagctgagcgcaggctccgttcagccacgagatgtatccggccgccgactcttcgggatccccacgaggtactcggagctctctgcagaccctcgacatggacgtgcagcaactcttcagatacgagtcgaaccacacctcgcggcctcggagtgcctctacggcctggtcctttctcacctccaacatggctctctcgagttccgcgacctcacacttcgtcttccaatactggatgcgacgatcttggtcagcaagcctactctcgagatctgctcagcatggaaacaactaagtcaagctgctcttctcttccgagaacacagaaaatcaagtcactccggatagaagaataaaggagatgaaaacaaagatcaccaacttagggaagtcatcgccatacccgtattcacgggcaaactttgacctacatcgtcctgggacacatatggttggagcgcaatcgccgggacgaccaccggtaactcgggctgcccacgctgctggacatcctcgacatcgacatacctacaaacgacaaccaaaaatattcaggaccaaagtgctaatggagaccaaggtgacgactgcacaagcaaaggcagttgaggccaacaaagtttttacaaggcataaccgattacaaaggaacaaaggtcctactcttcaaaaagcgggagaacagactctcccagctcgccgatttcctccatcacgcccttacgcgcgtcgttggcggccccccgatccaagatctgccgaagatcgagctcggggtgcgccaaccttacacatgcaaggacgtgacaggccccggtatagatcccgttggacgcctcctccacgatcctggccgcatgcttggagggtatcgcctccatcgtcgttgctagttccgcgagtgaagacgtcagcgagaactcgtcggggttcgccgggatggttgtcgtaacaccacattccccggcgagctggtgtaggccggtgtaggtgacccgcaacgagccacggatctccgacaagttgttctcgagttctgacatccgaccctcgagtgcccgccgttgtcactcgttgccggccaccagctccctcattttctggaggtcctcgcgaacctccgctaggtcgtgctccagcttgtcggcacgctcgttcgccgacgacgctgctgctgccctcgcctccgcaatctcgcgacttatgccgtgagcaccagcctcgaggatgcgccccatctcggcttgaaactccccccaggtgaggacgtcggcagacgggccgcgagtaggcccgaggtcactggctggcccactcggcgtcgcctcacggctcctcggcacgaccacgacatcggtcgaggccaccgcaggagatgcgctggagttccctccagacctgtcttgcgccgccttcgcctatgccgacctgcagaagatcatcatgtctggccctcaaaacaagtcgccagaaatcaaacaagggaaaaatctcgattttcgtctacttacttctcgcccagcgtcaccagcttccgccgtcgcgaaggtggcggagacgcatccacggcctaagtaaaccaagtacgaattgagggtggcatcttccgactatgcagttaacgaatcaagaaactcaccgatggggaggacgctctccggcggctgccgagcacggaggtgaactttctccctatccttgggacacggctgccactagtcgtagcggcaacggccacatcggacgcctcctgagcgatgccctccttcaacaaggccgccgcctggtggtccacgagcggtccaatggcgtcagtcagagggagagcctacattgcataaagtcattatccaatccaggagcaaaaatgaaggggctgccgactacactcacgttgattgcggcttcgcgctcggtcgcctccttctcacaaagaggaacggggacgtcgtctgccgttgtcgggccgctgatcatcagttggccaacgcggcgctccacggtggcgctatccaagcctgctgatcgagaacagaatttgataagttagggagaacacgcgcatgagggagtcaatttaactaaaaaggaaaataccccgaggagaaacccgggtcgcgtcctccggcccagaatagtcaaaggctgggtgggctcaggcctggagcggttggatccgtctaccgacgaagtcggtagcgacttcataccccgacaaacctcgtactcggaggtcgtcgatggcatcgatgaaggattggagggaaggggtcaaggcgggctttgcggtccaagacgaaatcttgtctggttgttcctcagggacgacaaagacaggatccgaattctctatctgaagatagaaccacctcgcccgccatttgcttcgagaagaagtgcactggaacgggatgtagcgcgatttcaagccatcccgaagtcggaatccgacgcatccggacaccctgttggattccatccaacgcaactcatagtagaagcggaagagatcgagaaaaggctctaccccaatgtaagcctcacaaaggtgcgcaaaaatactgaggaaggcaatggaattggggttcaagtggagcaaagaaaggccgtagaagtgcagaaccaatagaagaaattcagaaggtggagggagaaaaccacaaagaatgttgtcctcgatcgcaaccatgcgacctaggacaggctggggttcagtacctcctacttctctctccatgactccgcgaccgggaagggcgccctcttcctggagtttcttcagcgacgcgttggtggaagtagatttgccgagatccatcgccaactagagatcgtcggaggaaggacggagattaacaagcgagggtttttgcgggagcggggaagacgagggatgcttggaggctagaaagttttcccacgaacaggcggacttcagaatgaatccccaaaattcccttaagtagacgcgcttcgcacggcgcgaatttcaaggaaaggagatagatgcccgccggaaatttctgggtctattgcgtgcggcggtctttcagacttcagtttaaattcactcatgaccgttggacttcacatggtgttctcgactatgtcctgtctctacggttcccacaccgagaacgacatcagcttcgacatcagaagtcgcgttggtcacacgagttcatttaagcagaagtcgggggctactgtcagggttacgggttaggtataccctttacccttcgatatatgtcacatatcaatatggcatgcctgcgcatatagggacattctctatacgtgttaaggaaatccttcacggaattggcagatggaaagagacctactcgggcaagactgtgttgtcaacgtatcgtgtgcggttcgatgtctctgagtcctgcttggagattgcctgacctgcgatataaaagggaccccctgggaggacctgcgggatcgaatctcacagccaacgccaccaccacagcctacgaagtcggagcctgcaggagccgaatcgctgggagatctagtcgaatcaattcgattatgatctcgccggtttcatcgagttccatcgttccctttgtaacctgtgattcccatcatataattccataccaactggattagggctattacctgtcaagaggcctgaactagtataatcttcgtcttctgtttgcttgatgtcatactacgtagacccttgcatcaacgtaccccaataccctctatatccggtctacgggtatcaccacatgggcgcgaccgcgcgagctggcggccgacaagcgctgcgcggtgaacaagtgctggcccgtttggctttgccacaaactttgacaatttgactctttgcaaaaaatatttttacaaatgaaccgatcaaaacttattttaaaaataacccttttgttcagcgttacatcgtgtggcgctgaacttaaacatctcagcgccaaatagtgtgacgctgaatatgcgttggcacgctgacttagcctcccatctgcggtggcacgacattcagcgctagatgacgtggcgctgaggtgtctaaggtcagcgccagatgatttggtactggaaaaaaaagattatttttaaaataagttttagtgacggtttatttgtaaaattatttttttcaaaatatcaaattgtcaaaatttgtgtggctttgccttcctgtggctgctatgcaaagccaaattacactgtctcgaaattaactccaataggttgtacggattatatctactaaaggccttgtttagttctaaattttttctttaaacttttaacttttttatcgcatcaaaactttcctacacacataaattttcaatttttccatcacatcattttaatttcaaacaaactttcaattttaacgtgaactaaacacactcattgtgttcattatatctactactgttctccatcttatttccttcccatatacccaatcaattcttaattatatgcgtctagcctgttacacacttaagatgtgctcggctgatatttttgcaactgcggctaccgtagttaagaattgctgcaactacttgtagtcaatttgtgatatagcagccacagtagctgcagcttgtatggctaagagccttacacaacacgagtatattactggtccataaaaaaagcaatatgttcgtacttcctaggaatgcactatcaaatgtcacctcgcaaacaaagaaatttagagcgcctctcttgacggtgaatgctcggtggaatataagttcatttgagttctcttaacttatcaacgaattcgattttcattcttcaactggaaaaccagatacaatagatccctcaactcttaaaaccggtgcaaaataagtcctaaggcggttttagctgacgtgacgtctacgtggctaatttgactcggtcttcatctaatgtggcattgacatgacgcttatgtgacaatttaatttgcaaaataataaaaactatggtcccacatatcagttacacaaaaaataatttaaaaatactggggcccacgtgggccccacatgtcattcacgccccctcttcttgtcctactccccatctcccctctcttcgttgctcagagcggggcggctctgggcctcaggcggagtggcgcacgatggacaatggcagagaagcggcgtgcggcagcaggcgagagacgagagaggaggagtggcggccggagctgcatgacctcacccccccgcgccgccgattcctcctgttgcgtcgccgcattgatcttcatgagttggcgctggcaacggcgagttcgcagtcgcgggacacggacagcgtggcgccgacggggcccgagactcgagctcgaagccgctgccgccgcttcagcgggttctccaacgttgacgccatcgattcgtcccagtgctgcaagatcctgttttgtacacagccccctccccctgcccccagtcgccattcctcccccacccatccctgccgccgtggtcacccaagcggtcggcgagcgtagccactggtgagcgtttcgtagactgcgggcggagatagagaggaggaacatgtgggtcccactatattttttttatgattgacatgtgggtctcacatatttttcattttgcttctagagccatgtcaccaccacgtaggacgaggaccaagtcagactagccacgtaggcgtcatgccacgtcagctaaaacgccatctaaaccgctgagggacctcctttataccagttttgactgttgagggacccgttgtgtctaattttgcatcaaggatgaaaattgaactcggtgtaaagttaagggacctcaaatgaacttgttaaaaaaaagacaaaaacaggaaaggattgttgggctgaaaacgggagacgactacgtgttggtcggccgacggggagggggcaaaatcggatgatgacgtcagcatgacgcatacgtgcaaaaccattttaaactattttttctcttaaattatttatccaaatcatgatccgattgcaccattaaatttgttgcaattaaatcttcaaaataagaccatacatggatatattccgacggaaatttgtttagcttattattgaattattttaaaatgttgcacgatgttccaccaaatatatcggaattattttacagtagatcaaaaatgtttcaatcatttaaattaggtgttgtttcaccttatataaaaataatgttttagcaaatagcgaaagaatgtttcagttcactacaacatttgttccatacatagtgaaacattaaaagaacactggtgaaacatttttggtggaacaaaaaatgaaacaaattcccttaatagagggttttcaaaatatgtgggtgatttattgcaaaagaatatttcaattcactgcaacattagatatatacatagtgaaacattgtgagtacactaggtaaaatattttttgtggagcaaaaaatgaaacaaattcccttaatatagggtgctgtctatacgtcttgtgacagaaaatcccacctcctatcattcgaattttggaccattggatatgcttcaagatccgtgcagacccttttaaccctagctcctctcctcctccccccgatatagatcgcatgccgccaccactcctccgtcctcgcgcgatcccccaccgccaccgccccaccgccccaccatgccgccgcccgcctcaccggcatcctggaaggggtcaatggcaccggcgagaccctccccccccggcgatacccctccccctccccctaccccctctcctccttccctcctttcctcgaggtggcgacggggaggtgcccccgccctgccgtcttccccgtctccggcggctccccgccgccggatccgccaccaccggccgccgcctcctaatctcatgcttgctttgcccccaccgctgacgccggccgaccgccctccttcatccccgtggcttcggcggtgccgccgccgccttgccgcccgccggagtccaccgcccaccatcggtcctccgtcgcccacggccatccctctaaaccccgaggaaagccccctcttccccctcacccaacccccctcctaccctcatcccaaccccaaaccctaacccgtcagagttggggtgtcgccggcgccggagaagaaggggagcccgccggagttgaaggagagaagccgatgcacgaaccttggcatggatccaatggttcaaaatctgtaagatttcttccccaaatttcattcgaatgacatatagcaatcccgttccaaaatatgtgggtgatttgtttcaatggagtatgtggtggagacacttggcaggtggaggcagggacacgtgggtggggccaagggggcgtgcgtcgtggggggagggagcgctcgattttttctccctccccctatagatggccatatggcccaaggcccacggcctggcccgaagctcgcaattttggcccgatgcaagcatggcaaggcccgactggggtcgtgctcgtgccggcctggcctgacagccacgccatgtctgggctacaccctcggcatggtgggctggcctagcacggcccgatcaaataaaaaaatatagggacgcaaaatagacttatataatcgtataaggcaaggcccaagacaagaggcatacaaaatagacttattttccagccattcaaacacagccgcagagttgaggaaccaaaaatatactttttctacgagcaagcacaataggccttcgtgtcttcgggccagcctggcatggcccgagtagtattgggccgtgcctgggctgtgtatgctgcctgtgagctggcacggcacggcccgggccgtgccagcccgacaaacctcagcctaggcacggctaggcttgggccatgccgtgccgggcggcccagatgaccatctatacctctcccgagcaaccgacggggaggatattccctaaaaacggcaaagctggctgatagtgatcgctgatcggcgattgccaattaatcgaaggaataccgtgcccgtgcgaactgactccggctcggactagagttttgttgcgtgtcccattcaaattcggactcatccttgctccttgggtactcatttaactggagggcaccgatctcctggatctgctgtacacttcaccagaatcgatcaaacaaaacaaacaggagtgagttgagtaatcattaaccaaccaaggaggcaaggagggaggaagacatggatggcacgaggagcgccaagaggatgaagcgtttctcgggggcttgcccttgtccactgcccgacgacatcgtcgacgagatcctctcccacctgcccgtcaaatcgctcctccgattccgatgcgtctcgcggcggttccacgccaccatcacctcgtcacacctgttccaggaagcccatttcctccagcgaaagcagcggaacaaacacccaccacggctgttcatcaggccgccgttcggtcctcgacaacctttcttcgcctggcaatggcagtggcagcatctgatccccaggcccccggtagaggagatcatgaccgctagacatctgccacatggcacgatctttccgctcgccagcaagtcctgccatggcctcgtcctcctcaagatcaccggccaccacacgcactacctctggaacccttccacccgccacatcctgcgtctcccgggcacggacaacacgccgccgccggcgacctacggcttgggctactgctcggccacgcggcggcacaaggtggtgcgcgtggtgggttgccgctgctgctcgccggcgaccgtcgtctgggaggtcttggctctcgacggcgacgagccgtcgccgtcgagcagctggaggccgcccgccgccgcgtccacgacgccgccgccgcggcattggcattacccgcgagagaattggcgacgaggagccgcgctctgcaacggcggcgacctgcacttcctccgaggagacggcgacatcgtcacattcaacgtgaccgacgaatctttcggcgtgtcgtcgttgaagcctcctcctgagctgcaatctcgcgacgactttgagctgacagagttggatggctgtctgtgtgtgtatactttcacagacgtaaagttgcagctcgtggacgaggagccggagagtcctacgtgcgaaatatgggtgacgagagaagctgcagctggaagctgggagaagctgtgttccatcgaatgggtgagcgtgttgccgcctgaccattcgtgtctaaggtggtattggatcgccccgattcatatgtttagtgatggcaacaacgaagaaaagaagaagaaaaagatcatgtttgccacaggtacaggccatgtgttggtcttcgaccctagcgtcgggaccctggagattatcttctcgccggaggacgaagccgtcggcgaatatcacgattacagcaataacgaagtctctactttgggtttgtttgaggagagcctcgcgttggtgggcaacacaagtgaaaacatcgtcttctcgcaaccataggtgcaagttgatctggccgggcttgttgttccaacatcccttgcttatttggttaaaaaaaatgaaatcaattgcctcacctgccattgatagtcagtctccagtatgttatcagttttattcgtagatcgaatttagatttgtattttttatatcatcataatctatttttatctaattttataaaatatttatgcaactatctaagtcacatgcatacactcaaaacacaattgcgtactttctgctgccaataatggatcggaatgcccagataacggaatgggaagttgccgacctggcagccaaagagctggttgtattgatcaccataatcaagtgcttcaccaaaacaatacagttcacttttatgaaaattgatcttaagacccgacaactgttcgaaagctagaagcactgacttcatgttctgagcagaaattgagtagctggaaaggaaaacttctttcgttgggaagacgacttactttgattaactcagtacttagcagtttcctaatgtatatgatgtcattccttgcaattcctagtggggtacttaaaaaacttgactaccttcgatctaggttttattagcaaggggatggacataagaagaaataccggcttgctaagtgggacattatttgtcgtcccaaagaacaaggggggctaggaattcatgacctcgagataaagaataaagcgttaattagtaagtggttatacaaactacttaccaccgatggaatatggcaacaactaccacgcaataaatatttgggatcacaacctttatctcaagcctattggaaagcgggggattcacatttttgggctagtcttataaaggtcaaataggactttatccgttttggatccttcaagattagggacggctcccaagttaggttctgggaagacaaatggttgggtaatgcctcgttaagagaacagtatccttgtctctataacatagttaggcataaacagtcgactatcgcacagattttccaaaccaatcctccgtgcttttcatggcgacgggatttaattggtgcaaaactagctgcttggcataacttattgcctcgcatagctgatttggttctggtataggagcaagatgagtttcaatggaacctcaccccgaatggggtcttctcagtcaaatctcattatctagctctaacacataccggggtccgaatattaagaacggatttggaaggtgaaagtacccctaaaagttaaaatcttcctttggtatttacgtcggggcgtaattctcaccaaggacaaccttgctaagagaaattggaaaggcagcaagatatgttgtttctgtcacaaggatgaaactatccaacatttattctttcagtgccgcttatctcgcttggtgtggtctgtaattcatttggcttctaatctgaaacctcctcgcaatgttggtcatatgtttgggagttggctatcatgtgtctccaaagaaatgatgaatctgcttttgatgggtacaacaactctgtgttggtccatttggttgagcaggaatggagtaatttttgataacaagatggtgtcttctcctttgcaggttattaccttagttacccggtggctacatacctgggctatcctccaccaatcgggactgcgggatactattacggtggtatctcgatgtttggaccaggtggcacagaagttttttttacccaggagcatgggtggcggtctagtctatggattgatagccactaagatatatgtttctgtcaaacttttgtgcctgggagatgttgtgcttaggagatgttctagttgtttctttcttctttttctgactgggtgacggtctagtctatgaattgatagccactaagatatatgtttctgtcaaacttttgtgcttgggagatgttgtacttgggagatgttctagttgtttctttcttctttttctggctgtgtgtattttatgcagaggccgagagtgactcggtttaattgtatcatctttatgtaattaagttctaaaaactttctgctgccaacagcgacggcctgattaatctccaacgagctagctcacctttttattcaagctaatcgatgctttttttattttttgatacggatgtacatagaaggacttctacggtacaatttattagcgggcattgcttaattaccacacaacggcaaatcaattattcactgaagcatatatatagagaagctaccaccatgctacattatacatattgggtccgattctcaggtctccactctctccgccagcttgatacccgatgactccaagatctccaacgcttcacaaaatcaaacgcacgtatcagcaacccaccgccgttgctgggttcgataaccataagcaacaagtggtgtctgatttgatttgcacttacctggaatgtaaatttcaggttccagaggcctgatcactcctttcttttggatcttgttctggagcaacagctgaaacatgaaaacgagtataatgagtacaagtttcctctttgatcaggtatgcgtatgacaagtgtaatgtggttcaagagagctacttaccagagctcctattgctgctggtattccgaccgtgagagccatggcagtggtaggcctgccattttcaacctttccaaactcaagtagggttgcttggtgcttttcggttggtcggccatcagggtattccacctccacctcatggtgcagcagtaccatatcctgaattacatcaccaaagcaaaagcatttagcgtgtcagtaatggttatccttagaagtttgatggaaaagaagcttgtgaattatggtggtaaagcacaatctgaaacagaaattcggatagatcactgggctagcaatctactagagataatactccatgtgagcaataaaaaaaggaacaaatgcacttgtatgtaaagttcagctctctttcaagtttcttttagttaaagtccacaataaaagagtgaatatattctgagaccttgcccgttcaatgtaaaaaaaaaatcagctctctcagtctctcaagttcacttttgtattgtggaaaaaagagtatactttgataatttcatgaaattttctgtactgttatataaaatacatgagatcgaaggaggactgctgatatgatcaatcctcacctgctcattgtggatataagccattctctgctccattcgctggcaaatcacatcaaatgcacttgaacagttctctggaatctgtgtctcctcatataatcccaagaacctagccaagagatgatgtattgtcacttctaaattaccagcaaaatatccatgctttgctatgggtaaaagaaaatatataataatatgtcatagagatgtttgcttatttgaatacatgatattcacttgattgaaacaaatattagacaattatataatattagaaaatataagggactagtttgcaaaaagtacaaaagtagtggtggtggcaccactagtgtcttttatagtagtatagataacaaataattccttttttctggaagacttataacaaagaatttcaacaataatactgcttatttctaatatgttcctaaaatactacttgcacaaagagatttattgcataatattagatgtaaacacagctgtgatcttcatggcagtttctagaagaggttaaatgtggtgagcaatgttagaaagcacagggttcagaaactaacttgattgttttgactgtcttagcagctatttccttatctttgcaatgcccaaaactcaagagtctggaaatcagttcaccatcttgtcctccagagacttcactatattcctttctggcggttgtggagatgttacaagcattgaagagttcaacaagaaaatccctgtatgtagggcgagtagtttgttgcaacagtggatgacttgcagcatcaaaaaacccaattttcgcgaaggttgccattatctcactaaatcctgtacaagtgcaacaaaattatttgtataaatgatatttccagggaaaatgaatgtctcagttaaaacgaaacggtacatcaacacttgccttcataacgaagagtagccctgtacacagtagatgcttctttggagatcccatacaggtctccatacatcaaggaattccggtttggcaagtgttccagtgcaaaagctggaagttctggtaatctgagcctctttgcggattcatacaatttatcacctgttgaagttataggtaaattcaccaattgatatatgacagttgtatcttctttccataatatggattctccttttcttatttttatatgcaattttaaaatactaagatagttatacaaagatacactgaataaaccaattttttagcagtttaaaagctaattaggttccatgctgtaaaaacgaatgctagcctgtgtcatacatcgctttttaggcacaaagaacatggatcaagtacacatcaatttttggtgaagtatgtttttgtcagtaaaacatactataaactatgcatctgtttttccttagcaaatattaacaaatattaccatctacatggatgatttctccatgaaatttgtagacagcagggtttctccctgcacggatggcaccagctggactccaactacaaaagaggaaaaagcaaccatgattgtttcttgtaaaatctgttgcatgcaacatggcattgttatttccaatatgggaacatcatagtttacctgaacttataagcaagtggattgtttgcagaagctggagatggaagtcctccacaaaaggatgtaaatgactttattttccccttccgtgaatgtgcttcgtcaatcatcttcattgacatcatatgatctgcgtgccataagcaatattataacttgtttggactagcaaaattactctatgataaaattacattctttctcgttgcagtgataatgtttagtcatatcacatcccctaataatttgatgaacgtatgtaccataacaaatgtacatggttgaccatgatattaaggaaagtacctatgccaggatccaggcccatttcacagagaatagttacaccagcaccttctgcagattgttccaactttgacatggactcatcaacatagcttgcagtgaccaagtgcttcttcatctgtcatacaggaatcactgaatatcacaacgatggtggtttgaggcctcccataaatcatcacagatccatacaccaggggaacacaaggaagtatagaagactacctctatgcatactcttgctatggcagcatgaaaactggcaggcagcaagctaactactacttcaacctgcaagaggaggtaatcactaaattctctaatcgctggcaagttagtacatttaaaaacatattttcaaaatccattgcaacgcacgggtattttgctagttgcaaatgtaatttgtttgaaaagcaactccaagttaaaatctcattatagaaagaaaaaaaatggaaaagaggattgaagtcaggtcaaaattaattcccatgtgatttggcagccccactatgttcattataataccagaattgaaattacctgagaaacaagattggaaagatttttaatatctgcaacatcgagttgagcagctgttgcatttcttatgccatcaattgtctgcatatagagacaaaaatacataagaaaatgtagtatttttctaaaattaccttacaaatcttgaccaaaatgatagcattctgctatttccattgcttattgatgtacacagaacatgttgatagtaactcatgcaagcaactaaaaaatatgtatatatataaaaaggcttagtccaggaatgcactgtgctgtgagaataacctcttctgcatctttttggtacagggacgccacaataacatgaatttggtcaatgtcatgatcgtaggcactgctgctgaagatgtttgaataagaagccagaaactcagcagctggtcgacagactcttccagctccaagaattaaaacctttgacccttctttagccatgctgtcatcagttccacactcattgacttttcctatctttagagataattcaatttctcttctggcattaggatctccatgtgcattagctagagaagtcaaggaatcaataatcttatccaatgtagctgtatcatctgctcctacctgtaaaaggacatgcaccatataactcagaaaaaaagttgtactaaaatgtttggcttaatgcaatccaaggaggataagaccagtaacatgtttaccaagaaaataataaaacaataatatcatggtaaatacaaaaaaaaaaagtggcatgagttactggatatgtacccaaacaacaaaagaagttcaggaatgctataatacaaaatcagtttgtcttgtgtgatctgggtttatagagtttcagatttagcctagtattaaatttacatcattatttgatatagcataatgtaatgatgtaatgtgtgggtgacttccattttttttctaaataaagaagaatcaaactacaacaagttggtaaatggcttttgaactcgccatgaccaaattgggattagtcatgaattagccacgagagatagaagttaaggattatctggcttctagcgtggttttgaatctaactttttggcatggtctaatccagaacaattgtaatttgtcctgtattgattaatgccccccccccccaaaaaaaaaaaacagagagagagagacccgctggaatatttacacattgaagaaagatttttgaaattgattgtaggattgttaaagttcatcatatagggctgcaagattctgagttttatgtaacttgttcactgcatcacagctgcaaaactcaagttccaaaacagtcatacttccttgagagcgaaaaaaggtcatacacaaaattgaagaaaagaacagagttcagaagaagcatgaaaggaaaaggcacaaactcatggatgtccatccaggttgatgatcagtcggagtagaaagcaggcagagcgtggtgtactcagaaaggggaacggagatgaactagtgaacctctccaataattgcatgaagaatatctgagggtttatatctgactgcttttagtgtaatgacatggaaaggttcagagatttgtttgtagtcatcccccgcgtcgcctctcacgcgggcggctcggggggcgaaaccctagctgcccgcgccgccacaccctcttcccttcctccacctcgccgccgccagagctcgccggcggcaaagccggcggtgagccgggaaggcggcggcgaggccaaacagcttggcggaaccgcccttgcgcgaggaggacggggcaaggccgacgatgacacggccggaggcggagacggcgggtcggcttggggcagcggatccggcacctctgtggccggatctggcccccccacccgcggatccggccggcgcggtgggcgacgtggcggtagaggcggagcaggcggctagcggtgcgagagaggacggcgaggcagcctggaaccggcggcagcacgggtgttgtcgccgcgctgatttgctgagagcccgacggcgccggcttgctctgcccgtgctcccgtcggccgtcgtcgccggtaggctgtgagttcgcgacgcgtgcgggatgggcgggaaggaggaggacgaggccgcgggccaaggcaaggcggcggccggtggtctgcgaggtggcggtcggcgaggctttggccggagcgcggccatggccagcggcgtgaagctgtgggcggcgatgctgcgcgaggagaccggtgcacgcggtcaccgaggtcttctcacttggcagcttgagctacgggggcgggtgggctgtgcttgggcgttgaagagatagcgtggtggtccggcgatggtcgttgtgcgggatggttgtgtggggctttgttcgggaatcgctggcgaaagccttgccaggccatgggccggcatgacgacgacgacgtctttaggcgccgttcccctccttggaggtgttgttttggcgttgacccctcctagcaccaagaaccctttacgtgcaatggtagtcattggtggattcctgcaacgtctccgaagctctacaagcctagggtgtttgacgaggccttcacagacttggtttcgctctttgctccacggcgggtgttcatcactcttatttggttattgttaggtagagtcggagctgctttgttgttggggtgcgacgaagcttggcaatgatggcactttgcaatgtctttataggattgttgatgctagctgtgaggaggagtggtcccttggtattttgggctgatgtccttcgtgggcgtcgcttttgtttgttcattttggcgttggggtagtatcacaatgaagtcgaagctgctgtgtcacttgggtgacaagctcggcaacgataacatgtgtgttgtcgtgtcgtctctatggcaagcttgaccgatgccttgtgttgggctccgtcgtggtagcttaggttaggttagctgttggtgtggtgttgtagttgtggttttcacccagttttccctaattaattgagcattgtaaggtttggtcccgttttctccttacaataggatatcttcttcttaatataaaacgtcggcaacggcctgaccgttcgaaaaaatatctgactgcttttgcactagtcatactccctctgccttttgcagcagagatagagatgggtgggaccatgggaatggaacaggagcccagcacgtaattccaacctctgtcatttgctccttttgttctttatatcaacttttaaattcgtaaatccaaatatataggatcatcaagagctaccatacagtattactgctaagaaggttccataagaaaagacataacgtttcagttctcagactatttagctttcttggcagtaacaaaatttgttttttttaatgagtggtagcaggagattgataattttaggaacaggaacaattaatttcccaagctagaaacaccatgtaattttgttttttatcctgaataagtgtgcatagaaaagaaaatgatttcttacttcaagctctgaatttgacatgccatcaatgagtagcagattgttccaaaaatagcaataattaattcccaaactatagacgccatataatattgattttaattctaaataactgtgcatcaaaaagaaacatgtgttcttacttcaagctctgagtatgacatatcatcaatgctttgcccaacatcgcatctaatcaagtgaaaagaacctccggctgtttcaataatatccagagcttcattaataaggaacttatcaaagaggtggccactgagagacacctgtttcatgaaccaacaagtttttagagaaaaaaaaaacaatttagtccctaattgcatacatccaataatagtcagacagatcataaatgtactgtaatactagaaaactagagtctaaccaggctgttgtacttcttatcaggtaatagatttgttggagctggtggcaactctctgcacatgaacatatagaagaacattaggaccagtaaaacatgcctgaagctggtaaagcatcatagtcttagcgataagctatatcacagaacaccaggtagaatgataaaaacaggaaacgatggaactcatatgctaccagcctaccatgagctcacaaaaataataagggctaatattgtttgtctctagcattagatactcattaatccatcactgccataatccataaaaacattcattgacatatagcactgtttactagcttcccctgcctgttcacttcaaacagtttggtacatctatatttgtttgaacaaagcagaagaagaaaaccgtgccactaagtttctgcttaataactaaatctgcagtgctttatttactaattacgggtaaaagcataagacatgagcaatcgaatatatctccttttttatgtgaaatatatgtgcatcttaacaagattagctatttagctcattctgtccttctaaactatcaggacacaaatacagaatatccaagagcagtacaatggtgacaataaggaggagagcatagacttggattttgaaacttacattatagtctttctcatccgaggaatatactcatacagagaagtgagtctgccagcatgcgcaatgcaagcttttctcaagtgtgaaggaagctccaacagttccttagctgaggccaatctagcaacgaatttggataatatgtctccaaaatgttgggaggcctacagcatagaagttcagtaggacaacagtcaatggaaaaggtttgtgcttaaaacaaagatacccttacttattctataaaagagcccacctctttggaaaattctgtagggagaatgtcaacggctaagcagatcacaccatttccttccatatcatcatggcatgaattagtacaaggatcatacctagacatgtgtatcagtaatttgtcaaaagccacaactactgaaaagaagcagataattacaactataagaaagagacccatcaagtatctttctttagggcactttagcattcatcattatacatagttctaatgaactaaaattccttatagtcatttctcttttctaccatgacaacacctctccccccttatttaccccgatgccggcaaaagatcagagaatgacaaacaagttatgcatccataatgaacatccaaacataattgtaacagaaatttaggtatcgtcaacacagcttaggatgatgtgagaacttgttacggaactgtaaattatacacagcagaaagttagaacattacctgaagaaaggtctctcaattgaagtactcttgttcacaaattctatggaacctccaatgtcacaagttatatcagaaataccaaccaaagggcaaccattcttcatcagttgttgtaactggtcaatgctcagtaatcgtggaaacctcctctcccagtacatgcagttaactgttgaaaaccagatataaatattagcatatatattgtatataggttaaaccttgcaatttcttgcaacaagtatctgatttatctactcctgcaataattctttgcaaagtcttaggtacacatactgcaaacaccgcctcattagattagaaatttttacaaggcctacttcagtttttatcttactgttgaagtgttatatgctatacagaagatcagagccagaaactagctaagcaacactataattgttccttcaagatacaacaaatatatgtttgagaatgtcttagacattacataaaaaatcatattcatttcagtctggcttcacacattacatatacataaacacaatggaatattgtcaaacatcctctaaagaaagaatattgtcaaacaaaagcaatcgccatagaccataccaatggcagatgcatatggagcaatcctttcatgaaaaacaggcttgtagtgttctggatgagcataatagtcagcctgaaaaatgataccaattgggaattacagtgatgcagttgtaaagtaagggaatactaatgagatatttaacaagaatgaaaaaaagtttacgagtaatatttgaaattaattttacgataaaaggaaagttttaatcaatgtaatgaaaaatggatagcacagaattaaaaaattatccaaattgcttgatggaattaagaaacaatgaccaatattatgagacaaagggattacattaggacacaataagataagttatattatgtacactaatacaaatacacactgtaattatctcagtattttgtagcacactttaattcatcttatgtttctaaaataaaagaattgtgcattactttgttgaagcatctggtgggatccttgggagtgaccatgtctctagaagagacaacacaaccatacagctggaatactctcttgcttgattgtggatgttgagacagacttctagcctgaaaaatgaaacaataaagcataatgaggtgtcttaagaaactaatgcttatgtttacaaataaaatcaaatagctaaagtatcctatcatttagtttttttttaaaaaaaacagagtgaaactagatgtatactatcattcccacaaacaaaaaggtgctggcagaaactacattcagttcaaacaggtcaaaagagaaacttacgaaaactacgatgcttagatagttaacactaaaacttctgacagagaaggagtaataccgcagaaagctctggaagcttcccagcatcaacaaagctatggggcagtaacttgaatatctcttgcgcaccctgagaaactgtcgtgcatgaagttatatatatgtgagggatacaatgttacaatgagaccaattacaggtctaaagagatgctatttttcccagaaagtaagattacgaaatgggcaacagctaagaacttttgtctcttcaaagcaccacaatatatccaaacaacggatattcccaacttgagcttatatgatgggcaaaaaaaaaaggtacagtaaattaccatttccagttccagtgaatacaaatactattgggcaaattccagatggaagtccaaatgttgctatctcttcaccaatggcaatgactgcagccttggctgcagcgagtgaaggatacatatgtgattgccctagagagagaaatggggtcgagtatccaaggctcaagtaccctgaaatttaaggtgaaaaatgacctgcttgaataatccacaacaccaaacaattacttgtgaagactaaatggtgcttatgacgaaaaactgctacctaagatagtatgtgcagatagcagatttgggtggcactagaatatcatatcatgtcagtacatgaactgagaaattaaggcaagcattcttcatatcatgtcagtacatgaactgagaaattaaggcgagcattcttacgttgtccgagaccgtgtaagaagtctatcagtccagctctcccagcaaatttcccaaatgcaagcaatcttttcccatcatctccagcaattagctcataatcaaacagggatactcttttttcaaggatctgagaatgtgacctagaagtttagtacctccacaaaaaatgattgtatctgttaacggaaaacatggatataagaatatggtagctacctcatctaatagtggcatattttctttctgggccttatgggtgtgagaaaagaatccatatgctctatgtggaagaatcatctccagctgcataaaggaacatagataagaaaaattcataatcgcgatactggtacaggctacggtgcacagtcgattagagcatcgaagatggtaatgtaacctttggttgtttgattcctataataagaccacactctgacaggtcttttgaaatctcacacccaacatcctcgtattgagcatcatgatggatcctctttgtacttggttgcacgataatccgatttaccccagttcccctcttgcctcctccaagcagaaggcgagcacaatgggatggggttaatggtgctctcctttcccacatattagcagtctcggcaagaatcccaacaactccattgcctagtaatgtgtcactgttctgtggatgaaaataaatacagttagaatgtgaatgaacaaaaaactgcatggtttgatgtctgatagggccaagcaacatacttcatttcccgcagaacccatagagaagccctgttaaggtgccacagtgaagaacctgctatttacaattcctgagaatgaaatgcatgccaatcagggtatggagatttacaacaaatgattatagttgcaattatattttacacaaacacaatttagagcttctggaagttgcagctttttctagaatctccaactcccgaaacagtctagcttttcacccagattctaagaatcataagctatagagtctaaaaaatgattataagccataagctgcaaaacccagcttttccacattctcactagctggctactcaccaactacttctcaaattctccagcttgtcaagactacactctattgctgaaattatcttattttccaaacatttaatttgaagtttgatcaacatgacctaaatatgaagggaaatagtttctttttgtttcttaaaaaaagataaagaaatatcaagtagatgagctctcgaactgttccattgttaaacggaacccctcgtttaaacactcatgttgtcatgtgccaagtatcaatcaaataataaaaaagcaatagtgtaacgagaaagaggaactaaacatctccctttgtctataggtggagactcacagtctctcactgtgcaccatggtccactactccactctgagcctctgatgatgacaaccaaggaatctgaggtcctaatcaatgactccaagaggaaaacaatactcataccagtactatctttccaacatgattgacaaaacagaaccgttgattcttcatggaatctccggacggaccggacctcggagacaaatggcccaacggcccccaactccgcacctcactcgcacccatgccctgtacgttggggcagggatgatgatcaataattgatcatgatatgctgcattgctacctcctcacaggctccttgctgctatactattactggcctcacactttgtttctggccttctgttcacagcgtctctcgctaagcgaaaccgacgcgtaactcgtaagcgttggcaggtgtcacacgccgcgggcaaatgcgcatggacgccaccgccgcggagcacgagaggctcctgatcgtgaatccgcgccaccgcctcccccagcggccgcaatccggccgagctacccggaatcctcgcgaatgtcgtcccgatcgtctcctaccctcgggaaatcccctctctcccccgcgccgcgaatccccaaaacacacagagaaaaaaaaagaaagaaaaaaaaaagctcggctaggttggtgatggcgtcgtcgcgtacctcggattgccgcggaacggagacgacgacggaatcgtagcaggcggcggagtggaggcgcagccggagggattcgaggaacggatgcgctccagcttccagtttccaaggaggtactagtaaaataggaaggcggaagaagaagaactgcgcgatttggacacgtcggctgcggcggcgccactggccgtgggatggcgacgccgggccgacgacgccacgggagaggaaggcggcgtcgctggacctggacctggacaggagttggttctgggcggagtggaggcgacggcgacgaggacggggacggcaatatgaagctgcagcgtggccgtgtacgggggcgtggcaacagttggcaaatttgtcctctcccccctttccaagcatgagggggtgaaggatttatccagtgagtcagcgcctcagcggaatttccactttccagttgaaaagtttgtattgtttgactagttttttttaaaaaaagttattaaaaaaataacattggcagacgcacacgtacactggtagagaaaccatttttggtcggtcaacccatatccacaatagtcccggttccattaaaaaccgggactaaaaatgattttttagtcccggttaataagagaaagatctttagtcccggttgttgttaccaaccgggactaaaaatcatctttactcccggttggtaactccaaccgggactaaagttcatttttagtcccggttgattccatgtcaggctgtgtcagggccctatgatctttagtcccggttagtaacaccaaccggactaaaaacctatttttagtcccggttggtgttactaaccgggaataaaaatcaaaacacactatataatccatagtaccgatcctcttttcccgtccacacaacaaactcctccctctatctctttttttcctctctaacttcttatctctttccttatctctaactcccctcctctccttccttttttccttcaccacagtacaggcggtcggcgtggaggcggcgacgcgggggacggcgcggaggcggcctgcgcggcggtcggcgcggcagcgcggggggccgcgcggcggcggcggtgggcggctggcgcggcggcgcgggaggccgcgcggcggtgccgggggccgcgcggaggcggcggctgcggtgggcggccgctcggcggcgaccgacgcggcgctggccggccggcgcggatgggaggaggggaggcggcagtggccgccggccggattttttttcttttttttttttgaaatgtgaatctgtgatgtatttttgtgtgagatgtgaatctgtgatgaattttttagaaccctgtgatgtaatttttttaagagtttgtgatgtatttggagatgatttgtttgaggatttggagatgttctgtaatatgtgatgatttggatatgggaggggatggtgtgaaatcaatattcaatattaaaagcagaaaaaaaaagaaaaaatatctttagtcccggttggtgttatcaaccgggactaaagattctcccatctttagtcccggttggtaacatcaaccgggactaaagattgatttttagtcccggttatttgaaccgggactaaagatagcgatctttagtcccagattcgtagtcccggttggaaaaccgggactatagggggttatgaaccgggactaaaaagcatttctccaccagtggtaacgctacactaatacattaacaaaagcgtctcctaacacatgtttaaagaaacgaacaccagtagtatatctttgatgctcgcttatatgcgtatatatatgaacaccagaatttaaactctgatgaagttaggagactccaccgtttataccgctagtgctttttgtcttggttgactgatttttaccacgacgtttgaagcgatttgctcgtatggatggcggaatttcataatgaatcagttcatacttctgtgaagtttattttttttaaatcatgtgtttggtacagtgctatgcaaggtcaattggctgtgactctcagtctctctagatgcggaccatgcatgtttggtgtacgcgaatttgaaatatgtaaaaaaaatttgaggttttgattgagccatggatgagacgaacatgcacagacagtaccgtcacgtttcgagctgcgcgtgcccatctgtcgtggtcggtgtactgtggtacgtttcacggcaatcatggggcgaacgagttcaaaacatacagcgacataccaacgtctaatctacgagtgtttgctcgttacttctctgtctctccctttcagacttttgtatcgtttctcccaaagcacaaaagcaaaagatgaacagaaacactggaggtagaagatcgatgatgatgacggggatcaatggactgttgcacaggtcgatcgatcacctacgaaatgacgtgtccattttctaaaagaaaaaaaaaagagaaaatgacgtgtagatttttgtcattttggagtctctcgtatgctcgtttttgtacttcccttgctcagacgacgcatcaactttgcaaatgtgcaggacttcagccagaaccgatcgaaagcgttaattagtacttcctccgtttcataatgtaagttattctagcattttccacatttatattgatgttaataaatctagacaatatagaaaatgatagaatgacttacattgtgaaacggagggtttagtcaactagtcagttatcaccaacgtggagaggacgtagcggataaacatagccgctttagccagctaacatgaccacatcacgcattattttcttttggactaatcaattactcgctctgtctttagagattctgaaggaatgtgacatatagtagtactataaacaagatacttttctagattcgtattattagaatagatcacatcctccaagatcccttatattatgaaacgggaagagtgttagtgatcagtcaaatagtatagtacgtacaagatttaatattataagtcgtttgattttttcttaatcataattttttaatttaactaattttatataaaaaaataacatctatgagcaaaattagtttcgttaaatttaacattgaatatattttgatgcaatgtttgttttgaattgaaaatgttactatatttaactataaacttgaccgacttaaaaaaaaatatgtaccgattataatatgaaacggagtaaaccaattaagtcacgttttgaagtagcatgcacagatgtaggagttacgacataatatacgattaatctacgcaacatgcgaggcgtgttggatttgcaaggagtacaaagacgggcgagagccgtgatctgctggacgtccactacaaataggcactccagctagatttgggtcggagagtcggactcggaccagtccagatcacacgcaatctgagcactcagttatggcaaaacactttgcttatctcttccttagctagtatacgtacgtagtgcacatgaacaattgaaagagaaacgtactaaagaaaaagtcgacgctgtaataactacttactccgtctcaaatatatttacactatttatatccaacacttaaccattcattgtatttgagaaagttttatgattagtatttttattgttattagataataaaacatgaaaagtgttttatgtgtgactatttttaaaaataatttataaatttttaaataagacagatgatcaaacgttgaagatcaaatgttagacactaatatccacagttaagtttattttagacagaggtattaagaaaaagtcgacgcattgatatccacagttacctttattttggacggaggtggtaagaaaagtcggcgcagagagcgtgtacattttggagttaggtaccgatcgatcgggatcgtgacaacaacctatctgcagcgtacaaaatgagcgaaaacgacggccgaaagccactctcgtacgtgtgtttcttgcccacacgactacggcagcgagcgggactgcgttacagcgcgcgtggggcacgagtaggaggagccgaggagggagaagcacgtatatatttcgtttcaaaaaaagaagaagaagaagaagaagaagagaagcacgtatgtatagccagttggccacgtacagctagcgctatataaatttgcctgtgttgcgtagtatggtcttttgccaacaaaattcagttggcagagctcggtcatcgtgtagctagcttacctttgtcttaaaataaatttaatttccatccatatttatctacttttaatacaactagcatggtggcccgcgaagattgcgcggctagcaccgttatatttttctcatataatagcttaaatatattcacattttattaaatacattaaaatggcaacataatttaaattcttgatcaaactaacaactgtgtgatattcatattgtattgtatatacgtaatagttattaattattttaattttaaattttagttatttatagattgtatttctatatggactctagactcatctttcaatatttttaattttttaattccgaattttattattgataaattttattcctatatgaactctggacacttcttcacatattcaattttcttaattccgaattttagttatttgtaaattgtgtttctatatgtactctaaactcttctctcaacattccttattttataattctgaatttccgttattgttaaattggattcctatacggactctatatttgtttccaatatttcttattttttaaatttcagttatttataaattttattctatatggactctagactattttttcaatattccttatttgttaattccgaatttcagatatttataaattgcatttctatatggacgctagactcttcttctaatcttgcttattttttaaattttgtattttgttgttctatattgtatttctatatggaatcttaactctacttttaatttttcttattttttaattctgactttcagttagttctatattcctatatgtactatgtactatagactcttatttcaatatttctatttttctaattcccaatacattatttctaattgtatttatgtatggactctaacttcatttttcaatactttgtattttttaattttgaattttagttatttataaattgtattcctatatagactctagattttttttgtctaatatttcttattttttaattctgaattttagttatttataaattttattcctatatggactctatactcttctcccaatcttgcttttcttaatttgaattttagttattgtaaattatattttgatgtggactctgacttctatttttaattttcctaatttttaattccgaattttaattagttctaaactatatacttgtatggactctaatatcctctttcaatattccttactttaattctgaatttttgctatttttaaattgtatttctatatgaactctatttttattttttttcaattaatatgagaatttctaggccatgagagtagacttggtggcccgtacagattgcatggttagcattgctataatcttttcacgtaataacatatattctttcatattttgttgtagaaaaatattgaaattgtaaccatgctgaaccaaatcgaccaatctacgatattctaattaatatagtaattcctatgtctatagagcaaacgtgatataatggatcatctggtatatttgtttgtttcctccctccatctttatactcttttagactattagtgacatcttgtaattatctgtaatgtatttattagcatgcactattgtacaattagaaagggacaaataaattgcctcccacggccatgcatgatagcatgagtacggttactattagtatctcttacagtttccaaaattggtgtttcatcctgtttctaaataaaaccttgtccgtttgcatgtactcctaattttctttggttttttctttgtttttcttgtccgcttccacatattgtagtcctaatatgattctcttttctcttttttcttattttatttcgattaatgtgggattttctagaccatgagagcgaaaatactcctatcttaattttctagactaaattagtttcattaaatcaataattaaatatattttcataataaatttatcttgggttgaaaatattttttttctacaaacttggttaaatttaaaataatttgactttgaccaaaatcaaaacatcttctaacctgaaatggagggagtagcatatactcctatatttagggctcatattaatttgacaacttgcatagagttgcagtgatgcgttcaatttgtttgtcgcgcctttaaaagagggcatagccttttttactacggttgattccaggaagtacacactcaacacatataatattttctttttcattttctatctcgtgctacttcaatgtattgtagatactatactacacagacaaaatgtcgactacgtacgattgtaaaagatagctaatgagatgaaaggtttctccactaatatattatatttcttgcttttctacaaccaatataagactatttgtgtgcgctagtttttttttaaaaaaagaaaaaaaagctatatacacgtacgacgtaagaaaatttcaaagtcttactggctagcaccataaattggcacacaataacatagccagttatattagctacttctttcgtatcaaaaataaataaatctaacataaaatattatatattttaatatgatatcgtggttggctgccttaaacgcagcaaaattacgaaaattgcatgcatcgtcgtcaatggacactacatattttcttactacaaacgtacgtacggcagcgagcggccgacgaccacgacgattgaccatagatagacgatagacaaaatctaacgcgggatagatgggccatggttagctgggtggaatctcggagactagagcaacggttcaccgttcgcacgccacggcgccacgctgtgccgacatcaccggctgcacgcacgtcgcgggcttgtcgtggccgccgcggagaaaagaagctgccgcggcgccgcgcacgcgcgctgtaactttacgtaacgtggctagctactacactactactatgaccgtttgcattgcattcgatcggttgatcccatgcttttgtatggacctgtggctctattatactacctctgttttcttaatataaggaattttagcatattacttgcactgttcggtcactcatcttattcaaaaaatttacgcaaatataaaaatataaaagttgtgcttaaaatactttgaataataaagtaagtcataaataaaataaataataattctaaaatttttttaaaaaaaacaaatagttaaacagtgtaagtaaaatatcaaaatctcttatattagagcacggaggggtatgatgagtacaagactttaagtagcagttggttggttgatggttagtttctacaaataaaaggaaatgtgcttctgagattttgatttctaatttacatttttatgtagagaggaagatttttttttcaagaaaaatctgcagttgctttaaacttttctacactgtctcctttgattaaagagacatgggcgcgaccgcgcgagctggcggccgacgagcgctgcgtggtgagcaagtgctggcccgtttggctttgccacaaattttgacaatttgactctttgcaaaaactatttttataaatgaactgatcaaaacttattttaaaaataacccttttgttcagcgttacatcgtgtggcactgaatttaaacacctcagcgccaaatagtgtgacgctgaatgtgcgttggcacgctgacttagcctcccatctgcggtggcacgacattcagcgctagatgacgtggcgctgaggtgtctaaggtcagcgcatgatttggcgctggaaaaaaaagatcatttttgaaataagttttagcgacggttcatttgtaaaattagttttttcaaagtgtcaaattatcaaaatttgtgtggctttgccttcctgtggctgctatgcaaagccaaattacactgccacgaaattaactccaataggttgtacggattatatctactaaaggccttgtttagttctaaactttttctttaaacttttaactttttcatcacatcaaaacttttctacacacataaattttcaatttttctatcacatcgttttaatttcaaccaaactttcaaccaaacgttcattatatctgttgacaggtgatacccggatatagagggtattggggtacgttgatgtaagggtctatgtagtacgacatcaagcaaacagaagacgaagattatactggttcagaccccttgacaggtaatagccctaatccagttggtatggaattatatgatgggaatcacaggttacaaagggaacgatggaactcgatgaaaccggcgagatcataatcgagttgattcgactagacctcccagcgatttggctcatgtagggtccgacttcgtaggctgtggtggtggcgttggctgtgagattcgatcccgcaggtcctcccagcgggtcccttttatatcgcaggccaggcggtctccaagcaggactcggagacgtcgaaccgcacacgatacgttgacaacccaatcttgtctgagtaggtctctttccatttgccaattccgtgaaggatttccttaacacgtatagagaatgtccctacatgcgcgggcatgccatattgatatgtgacgtatatcgaagggtaaagggtatacctaacccgtaaccctgacagtagcccccgacttctgcttaaatgaactcgtgtgaccaatcgcgacttctcatgtcgaagctgatgtcgttctcggtgtagaaaccatagagacaggacatagtcgagaacaccatgtgaaacccaacggtcatgagtgaatttaaactgaagtctaaaagaccgccgcgcgtaacagacccagaaatttccggcgggcatctctctcctttccttgaaattcgcgccgtgcgaagtgcgtctacttaagggaattttggggattcattctgaagtctgcctgtttgtgagaaaactttccagcctccaagcgtccctcgtcttccccgctcccataaaaaccctcgcttgttaatctccgtccttcctccgacgatctctagttggcgatggatctcggcaagtctacttccaccaacgcgtcgctgaagaaactctaggaagaggacgcccttcccagtcgtggagtcatggagagagaagtaggagttactgaaccccagcctgtcctaggtcgcatggttgcgatcgaggactacattctttgtggttttctccctccaccttctgaatttcttctattggttctgcacttctacagcctttctttgctccacttgaactccaattccattgccttcctcagtatatttgcgcacctttgtgaggcttacattggggtagagccttttctcgatctcttccgcttttactatgagttgcgttggatggaatccaccagggtgtccggatgcgtcggattccgacttcgggatggcttgaaatcgtgctacatcccgttccagtgcccttcttctcgtagcaaatggcgggcgaggtggttctatcttcagatagagaattcggatcctgtctttgtcatccccgaggaacaaccagacaagatttcgtcttggaccgcaaagcccgccttgaccccttccctccagtccttcatcgatggcatcgacgacctccgagtacgaggtttgtcggggtatgaagtcgctaccaacttcgtcggtaggcggatacagccgctccaggcccgagcctacccagcctttgactattctgggccggaggacgcgacccgggtttctcctcggggtattttcctttttagttaaattgactccctcatgcgcatgttctccctaacttatcgaattctgttctcgatcagcaggcttggatagcgccaccgtggagcgccgcgttggccaattgatgatcagcggcccgacaacggcaaacgacgtccccgttcctctttttgagaaggaggcgaccgagcgcgaagccgcaatcaacgtgagtgtagtcggcaaccccttcatttttgctcctggatcggataatgactttatgcgatgcaggctctccctctgactgacgccattggactgctcgtggaccaccaggcggcggcctcgttgaaggagggcgtcgctcaggaggcgtccgatgtggccgttgctgctacgactagtggcagccgtgtcccaaggatagggagaaagttcacctccgtgctcggcagttgccggatagcgtcctccccatcagtgagtttcttgattcgttaactgcatagtcgaaagatgtcaccctcaattcgtacttggtttacttaggccgtggctgcgtctccgccaccttcgcgatggcggaagctggtgacgctgggcgagaagtaagtagacgaaaatcgagatttttaccttgtttgatttctggcgacttgtttcgagggccagacatgatgatcttctgcaggtcgacacaggcgaaggcggcgcaagacaggtccggagggaactccagcgcatctcctgcggtggcctcgaccgatgtcgtggtcgtgccgaggagccgtgaggcgacgccgagcaggccagccagtgacctcgggcctactcgcggcccgtctgccgacgtcctcacctggggggagtttcaagccgagatggggcgcatcctcgaggctggtgttcgcggcataagtcgcgagattgcggaggcgagggtagcaggagcgtcgtcagcgaacgagcgtgccgacaagctggagcacgacctggcggaggttcgcgaggacctccagaaaatgagggagctggtggccagcaacgagcgacaacggcggggactcgagggccagatgtcagaactcaagaacaacttgtcggagatccgtggctcgttgcgggtcacctacaccggcctacactagctcgccgaggaatgtggtgttacgacaaccatcccggcgaactccgacgagttctcgctgacgtcttcactcgcggaactggcaacggcgatggaggcgataccctccaagcatgcggccaggatcgcggaggaggtgtccaatgggatctataccggggcctgtcacgtccttgcgtgtgtaaggttggcacaccccgaactcgatcttcggcagatcttggattggggggccgccaacgacgcgcgtaagggcgtgatggaggaaatcggcgagctgggagagtctgttctcccgctttttgaagagtaggacctcagttcctttgtaatcggttatgccttgtaaaacctttgttggcctcaactgcctttgcttgtgcagccgtcaccttggtctccgttagcactttggtcctgaatatttttggttgtcgtttgtagggatgtcgatgttgaggatgtccagcagcgtgggcagcccgagttaccggtggtcgtcccggcgattgcgctccaaccatatgtgtcccaggacgatgtaggtcatagtttgcccgtgaatacgggtatggcgacgacttccctaagttggtgatctttgttttcatctcctttatacttctatccggagtgacttgattttctgtgttctcggaagagaagagcagcttgacttagttgtttccatgctgagcagatctcgagagtaggcttgctgaccaaaatcgttgcatccagtattggaagacgaagtgtgaggtcgcggaactcgagagagccatgttggaggtgagaaaggaccaggccgtagaggcactccgaggccgcgaggtgtggttcgactcgtatctgaagagttgttgcacgtccatgtcgagggtctgcagagagctctgagtacctcgtggggatcccgaagagtccgcagccggatatttctcgtggctgaacggagcctgcgctcagcttgagggtattggtcaacgcatcgacgaggccttgaagcaggagtgtcgtcgctcaagccggtatgccgaaggacacgtgttggcctgtatacgagatcaccgtccgcagctgcacctcgagttcctccgcgaaggtttttcacgttctcggaggactcctacggagatagatggcctggcgaagtcgatggcgccgctggcggagaaagttttccagtcaatggactggtgttggccttcctggtagcctttgtaccctgtgatagacgtcttagggaaaagtgtaatatggttttggacttgtgtgaaattgtaagaagtatcttatgaaatagaaaagaaatctatcttaatgagtccttattctggatgtagtgtgtaagagtgcctcctcagttcccgactttggccagtcgtttgagttgtacactctccctagaccctagccttgtcgtcggaggattcttctcggaggacatggctcttggacctttgacctgcctcggttgaacaagcactgatcctaacccccagccgcgaagttggaaagttcatttccgattatgcgacttggttaatacgcacggggagaactcttacacgaccaggtctgacatggtctttcgtctccacagaatccgacaaggccttatcggctctgggcgtccccagccgaagatcccttaggttccttggaggccttgtcagcatggcataaagggacatgaggataggtttcaacgctaagtgtcatctgggtgagggatcatcaggcaggaacactgtgattgtaatatgcgcctgaaaataggctttattgatactgtaaggtgtcttacaggtatgggtggtattgactcatacgtagaatttacgtagttggtaaaagttccatgagtttgccaactcgcggccatcaccgtctgcaattttgaatgcgcctggccgcaagacttgtgtgatcgtgtatggtccttcccatttaggtgagaacttgtttcgccttgcttggttttgaacccttcggaggacgtagtcgccgatcgaaagtatgcgtgctcggatgcgcttctcgtggtaacggcggagggcttgttggtagccggctgctcggacggcaactcgttcgcgatgttcctcgagtagattcacattgtcgtttcgctgctcctcctgatactcgtcggaatacttctgtgctcgtgtactctgatgtcatagctcgctgaggagcatggcctcggagccgtacacgagaaagaagggtgtttccttgttagacgttgtcggtgtggtgcgtatggcccatagtactaatgggagttcttcaacccatttcttgtcgtgtgacatgagcctgtcgtagacgcgggtcttaatcccttgtagtactatgccgtttgccctctcgacttgtccgttgctttgaggatgagaaaccgaagcaaagcatattttgactcccagcccgatgtagtaatcctggaaatcggtgctgatgaactgggagccattgtcggtgatgatgcgatgcagtagtccgtatctgcaaaatatccccttgatgaacatgatggcgttgtcggccttgatttctcccgtgggtaccgcttcgatccatttagtgaatttgtcgatcgccacgaataggaacctgtagccgccttgtcctcgtgggaatggctcgagtatatctagcccccagcacgagaacggccaagtaagagggatggtctggagcgcttgtgcaggtagctttgtgtgcttgctgtggaattgacaggcttcacaccgctggaccatgtcgcatgcgtctttgagggcggttggccagaaaaacccttgtcgaaaagctttcccgaccaatgtgtgaccggcggcatgtgacccacagattccttcatgtatatcgaggaggaggtgtctgccgtcatcggatgagacgcatttgagaagtactccgtttggcgctttcttgtatagatcgttgccgatcatgcagtagatttttgctttacgggttattttctcggcctctgcgtcgtcctcaggcaactcttcgctgttgatgaacttgatcagtggggtgcgccagtcatctgtggtctcgatatcgacgatggcgtgttccgcctctgtgacctccgagctgatgtcgggggcggctgtgttaatctcgccgatggcctctttcactgatggctttgtcaggatgtccaaaaaggtgccgggctcgagtggttcttgcctggatgcacgtcatgctaggtcgtctggctcgatgttgtccttgcggtatacgtgtcggacctcgatcccatcgaaccttttctccagcttcctgacctctgcgaggtacttggataactcggggttagagcatttataatctttgtatacctggttggcgactagctcggagtcccatttcacgatcagtcgtttgaccccaagttcagctgctgctcttatcccggcgagtagtccttcgtactcggctgtgttgttggttgccctgaatttgaggtggattgcgtgcttgaattgatctccggaaggagatgtcaagacgaatcctgcccctactccttggctgttgagtgcaccatcgaacgccattgtccacgtttcgttgtcgatctggttgtctgattggttatcaggcatagtccaatcggctacaaaatcggcgagtacctgggatttgatggctgttcgtggtacaaagtggacatcaaactgacttagctcgactaccctttttgcaatgcggccgacaacgtctttgtttctcacgacttcaccgagagggaaggaggagacaactgtgactctgtgggcttgaaagtagtggcgtagctttcttgatgtcatgattaccgcgtagagcagcttttggatctgtggatatctggtctttgcgtcatggagagcttcgctgacatagtagactggtcgttggactttctctctcgacaacaatgccagtgctgacggagtatggcgtggcggcaatataaaggaataattcttcattaggttggggagcgacgagtacagggggatttgataggtagcgtttgagtgcaataaatgcctcttcggcttcctgtgtccatacaaatttatcttgcttctttagcagagcgaagaagggttgtcctcgttctcccatcctagctacgaacctgcttagtgctgccatgcatccggttagcttttgtacttccttaagtcttgtgggtgacttcatgttctcgattgccttgatcttctcgggattcgcttctattcctctgctagagacgaggaagctaagcagcttgcctgacggtactccgaaggtgcacttctctgggttgagcatgaggcgatatcgtcgcaggttgtcgaacgtttcccgtagatcgtcaatcaatgagtcgcttttcttggtcaacgtctgcgccggcgttgttcaaggctgcatcagtacattcgacctcttggattgctctagtttggatgatatatttgcctacctatttatcatatgtctctgttaatctagtcttagcatatcaatttagctctatcggctgcttctcgttttagggtttatgccggtatcggctaaatcgccttgctagattagattagcttagacatctaccaccctgaaaactcagtcaacagcttgattgtctagatattatgtttcttttcatacttagtgttgcatcagttaagtttgatctactaagtcgtgcttagaaccataatatctagcctgcttcttgactgccaataagggtttcatcggggtttcagccgatgagttatctggacgttgcatcggcttataaggattgtatacatgttggatttagccgatgacaacaaaggtttcactgtttaatctaatctgtggattttatgacatcggacctccagccgatgtatgctttgaccttcggatcaatgcttattctatcatatcattgctagccgattggtttatattggattatgttattgttatattatattattatcagccgattgcatttatatcatcatctatattggacatatagccgatcgcttaaaccctattgctatcggctggtatcggcgtcggctattatcgatatcggctgagattgcagcatcggcttgtcagccgatcggctgttttgtttattatttgcatatcttgtcagttgcaagatcaaactgactggcacgcccgcatctcatcatatttggacctgcactggagttaagcagatctcccagaccggtgtgtttgatttttttcgtcaacacaaattggcacgcctagtgggaccacgaattttatatccacatgtctgaagaagaagtcaatgtcaagatcatggtcacaatgtagaatttaacagaggaacaaaggcaacagatgaagcagtttgtagctgattttcaaatgcgttgtcttcaatgtttcatcatgacaccagaagggccaactcagaagactcaatttcccaagccgatagttgaaatacttcaagatacagttgatgacgcagttcatcgcgcattgtttaatcaatctggagttttggcggatacattacaaaatttgatcaaagtaacagttgatgagttattcagaaaagccagctcagggagcagattgaagaacaacaacagcatcggctcggggggcagacacatcaatgtcagcatgatgagctatatcaacagtatcggccagaagaatctcaaagatatcagaatatagaagattgggccgatagaattgcaaaattagtagaggagcagtttggaattagacctaaggaacggatccatatgtatcggcagccatatcctgaatggttcgatagagttccacttccacactgatacaagattccagatttctccatgttttcagggcaagatgatacatctatacttgaacacatcagccgattcttactgcaatgtggtgaagcatcgactgaagaggctctgaaagttaggttttttccattgtctttgactggatcggctttcacttggttttcatcattaccatcaaattctatcagaggatgggccgatcttgagaagcaatttcatgactacttctttgctggattcagcgagttgaagctttcagacttaatatcagttgagcagcaaaaaggagaatcggctatggaatatattcagagatttcgtaatgtccgcagccgatgttatagtttgagcctaagcaatgaacagctagtagatcttgcattccaaggattgtcagcacctatcggagatagattcttttgccacgagtttgacagtctagctcatctaatgcaaacaatatcggctcatgaaagccgattgcacgaagcaaaggaagatcggttttggagttatcaagacaagaaattttgaagcatgagttctcatactccaaaactggggggcatgtgttaacagtgaaatttggtaagcccaaagttaccatcggcttagagtcagtatcagcttcaaagttctagaatcagccgatgggagtcaagtcgccacgatgtcgtgttcatggtggagtcggatcaatcaaaggaagcttatctagaagagtccgagttcaagaccgatgcgacatgacagtttatctattaattaggcatagtttgttagtttcattttatctttaggaaagtgtgtttagtgtccgataaggactttatattttcctttttagtttctttcttgtccgacaaagactggttcctttttagtttctttcttgtccgacaaggacttgtatctccctatgggtataaatatgtacacccggggtctatgtaatctatctctacgatcaatacaattcggtgcatcgccacccttttaccttttctactttattttatcgtccggcgggacttggcacctgacgcggggctgcatcggtgttcgatctccggcgaaggggtaagtccaatgttccgtcggcccaggcaattgtatcgtctgcgccggcgttgttcaaggctgcatcagtacattcgacctcttagattgctctggtttggatgatatatttgcctacctatttatcatgtctctgttaatctagtcttagcatatcaatttagctctatcggctgcttctcgttttagggtttatgccggtatcggctaaatcgccttgctagattagattagcttagacatctaccaccctgaaaactcagtcaacagcttgattgtctagatattatgtttcttttcatacttagtgctgcatcagttaagtttgatctactaagtcgtgcttagaaccataatatctagcctgcttcttgactgccaataagggtttcatcggggtttcagccgatgagttatctggacgttgcatcggcttataaggattgtatacatgttggatttagccgatgacaacaaaggtttcactgtttaatctaatctgtggattttatgacatcggacctccagccgatgtatgttttgaccttcggatcaatgcttattctatcatatcattgctagccgattggtttatattgtattatgttattgttatattatattattatcagctgattgaattacactgacgagccctagttaatttactgtggtaataataatatttccagagagcaactctaacctggtgtttggggatgtcgaccaggcatactacatctgcaagtctcttctgcagcagggcttcaggccgcagcaattcatcccatccaccgcaaaatgtaccacctccttggcaacatgtctgcgagccattccatcacctctagggccagaagcccaagcagaatacagtgactggatatcctcttccgacaacccgttccgactgagatcgagcaccttcagttgctttgcagaaatgatggcatcagcgagttcttggatggcatggcaaccagaagaggagtttctctggcatgaacttgcacagctcccatctgagccggtcgctgcacgggtatcctcgtagactgcctcttcgtcttcgctatccggcacctccatcttatcagggtctatgcgatcgttcgcttcagcattggtacgttggttttggtcagtacctggtgatacatcctgcgcgtcttcatcgtactgcaatgttctctgtagtgccaggtttgtgttctcagcaatgcgtagttcctccaatcggtcatttcctgaaagtagcacgagactttgaggttgaggcagaaacttttcatatttgttaatttttatgtagtggtcgttcctcacctgctagtgcttgaataatgcccacgatgccagcaagcccaagattgcatctatcaagggtgagagatctgagactgcattggggattcgaaagcaataccccaatagcttcacatccctgcaccgtacggcgtaagtcaaaccattggggttaccagaatttgtataagtatatcaaggcattcgagaataggaaggaaacctctagggtaaaagaatttcctccaaggttcaagtcaataatattaattttagaaagatttctagagttgtgagaaatcaggagttgtaagcccacagttggataaatccaatctcagcaattcttgtgatgcacaggagagtgcctcagtaagcttagttgcccctccctacaaaaaaaaaaaaaaaaaaaaaaaaaaaaaaaaaaaaaagcttcatagataagaagaatgttgtttgtacaatctgaaaatacttttttttttgtggggacaatctgaaaatacttaaccatgcgtgggaagcagactcactgatccaatgttagttccacctagcagaaatcctgataagcatgaggattgtgcaagtagacacagcttatcagccattaacttattcagttttataccagtcaggcttagttccgaaaacctgcagtgatgatggctatccattatttcactgcacatctattcccaataggtatcaacagtaattgaacaaatgttagcgaaccttttcagagaggcaagtttggagagaaggctaagcattgtatttccagaaattggattgttgtttcctgtcaaaaatatgaaagtttgaaacataagaatgtttatgaaacatatctgatagtttcaattatgcagagcaggagtaataaaagtacctaaggagagatgtgaaaggacagacccttcatgcagtgcatctgccatcttctgaactgttcttgatgtgatagaacattgctcgacattcaagctgtacagtgctgttacgatatgtaaacagaagacacattctataagaggtaattaaaagctggtgccatcaaagaaaaagaaggctggcgaaaacacagaaagtgccaaaaacagtacctacctttgcacttctgtaggactgtgaaaaggtaagaaccgcatgcatctgtgaggcgattcccagacagattaagtacttctaatcgattagtcataacagcacactcacatatctgtattagtaaataaggagcaaatgatttcagaattctgttcctaaaatgaacatgtgcctgaaagcaagacagcttattttggtctgataggcagtgaaagaatagtttgttctgataaaggggtcaaccctccagtttcatcagagtatggaattagaaccatccaaatggtttcagttggttttaacaggatcattgagatttgcgactaagagggacatccaatctcaatgcagaaaatcaaccagtacttgttatagcacattcccagttgagtctaaagtaagtaatggagtatagcttttagtgatctaaatttctcaaacagtaagactaaagagagatatcgcaaaagttaaattggttttcaacaggaattctcccaaagaattagtagacataaggactgcctgtagttcgggcctttctcggccttgttaaaagtcttatggaacatctctccccaagagtcaagttttccttttattgtagaagaggatccagtccattttaatgtgcaatttttttgagctttcaaaagcagaaataacctgtagtttcactttgataaacaagtttagggatagtaaaaagacctgaaataaagcagttggaccaaatcgattacaatgtaaatccagtgtcaagccaccatatgtttggcttgatgaagaaaatatttgttgaagcctctcaattgtttggtttcctgcagttcgtgaacataaactttagtcattgtaagagcatagaggaattaatatgatacacacacatttagcttgaactggctttctgtgatgtcgccaaatcattggtgcatagattacataagacaaactaggagaagaaacagatatactggaaaaagcatacctagcatattatgggaaagatccaacacagctattgttttatgtaattttagagcatcaagaaaaggtgtgatcgacaggtcttggagtccacaatcagacacaataacttcatcttcagagacctgtcaaaaaatagaaaggcatgaacactttgactcttcaaaaataataagccactttataacattgtcaatcaaatatgaatgatacaaatctaacaaacttacttcaagattatataatttctttaagagcttcttgtttggcgcttctgataactttgtgcagaaatcaacatacaatttcatcagccgctttggcacccaatcttcattataaacatggtatatcagatgaggtataactataggaaatatgtacattacatttcagtgcgacgcattggaatgcaatagaaagtttacccatgaaaccaaacacctatacatggagtttagtccatatacagacctaaaatggtatcaccatgtgacaaacatatgcacaccatcaacatttaaaaacacatacataatgcaaaaaaaaaaaagcggtaactccaatacttgattttgagcagagaagctgaaagcctcaattagtgagttcatatgagaagcttggtttggagaagatttgatgcaaaaattagatattaatattatactaatatttaataatgacagtaaaccagcatgatttatcccctttttactagtaataatcattttatgtaatgataggataggaaggattctgaagttaagataaacagtagtttgccagagatttctgctattctgtttattgggcaatctcttctgaatcccaatgtagtaacttttctccttaatgcaatgatacacaaatctttttgtgacttccttaaaaaaaatgaaacccactgtagtaggttagtagcatgaagaacaaaccacactgatattgtactgtactcagttcaatcaatgacttgatgtccttcaatgcataacagcatattacatgtcatcaataaagaaggaaaaatcacagtgattaccaatactagcattgatgcaacaatagcagttttatcaacacagatgactacaggcaaccataccatcaataacaacatcaatggacttctgttcagaggcaagttgatcaatataatctcgtgagtctgtgtcatctagtaccttcccacaacacttgagttccccaataataggcaacaaacctagcaaagcaagataaatgtaagttccaacagaaaagaaaaaggaagttgttcccgaataatatggaactgcaagtaacgtagaaactaagccagcacaactgtctcctgcatcacactaggcatgcatgatttatagacatagctgaagtaatcatggagtaaaacccataaacataactcataaaagttattgaaaaaaggcaatgacacatgattggcattctacattctttcaacaattaagactgtacagtaactacaatgacatggaaacagcttcaaataagttttacaaccctccacctaccacaatttaaattaaaatgaagaaactatgttctatttcactgatgagaacagcaacagcaaaatcaccgaattgcaaatttgatcccatttctaatgataaaaagtagttcacagttattaaatggacacaccatgtaatttactgaaactaaggagacaaacctttggacctcttatcatcaggaatctgaagatagtacacgcatgccacttcaactttaagagactcaatgctaaaggcaccctcacgtgtacatgcatttgcgtccaagtaaaccaaatgttcaccaattttgaacacccagaacttctgcacgttaggatcaatcatatttcaataactggaacagttgtcataatcaatgataatgtgactaaaaccctggataaatcatttgaaacataacttcaatattgagagaaaggaaacatttaggtgaacattaatcctaggttgactacttgactcaaatatgatatgagcattgtatgaagctaactccaaaagaacttgatagaggttttgacatgtggggtccatccaacatggtagaagtgatacacataaagggtggtagcagtatcttttgatggtaggtccacatgtcaacgatctaccagcggttgatttctttgccggtatttgttagtgagcttcagctacacatggtagcttatcctaaggtttatttggtccaaacctctggcccatgtcacaacaaaaaagaaatatgccttcccagaattaatgttagatatcagaacagaaaatgttcagttaacatattcatctcttctaatgtattttagcatcttcgtgaacatttaaagttaacagccaaggaattcataaaggattctctaaaggagtgttttagtaggaacaaaagcaatgggaaagaatagttgatgcctgcttttcatgagcatgggaagacaggattaaagaaaaacttacatgatcagcatctgaggattgaaggccgacagcattttgaccttggggccgactgtttgatgcaagtgtaccaaccttggaaccactcgctgctggtttggacacagataacttccctatgctagaagctcctaaatctgggccatcattaccatgacaaacaggactaccagatttgaatgaacaaatactttcctcagcagggcagggagtgcagacactgtctacttctctggtctcaatgggatgagaggtatgctgcagatgaacactgattatcagtttccagtgttttgtaacagtaagttcttgtcaatatctaatggaacaaatgagaacaattgatgcaatgcaaataatgaatatcttaaattccttccaataacaaagttttaagggattatgtattgtataacctgatttctgtttctgtttgctgtatttgcaattcgctctgttggacacagaaaaaatgtatcgcacaattagaagaaaaatattttgtattccaacggcaactactgaaagtatggtgtactcataagtcaagaggcacacctgaggtagacagactatctgctcgaccagtaagtgttctttttgactgatcaatttcaggagcttcttcagcttcatcatctgatattacaactcgaacacgctttctaccataatggttgctaaatgatttacttacatcttcttcagggctctcatccatgccacatgacccatcaacattctttgtactactatgcatcttagatgctttggtcttagaagacctacttttatgaacaagtgaggcaagaacaacatcatcatcaaattcctcagaactattatttgcaatattcccatcattatcctctgtattgaggatattatcagatacattgccatcttcactttcagtttctgagcaatagtcactaactgtatcccttgcttcatgttgatcagacattctcttcaggttgtctatttcttgctgcagttttctgaagttatagaatatattttagaacaggttttaataagtatattccgtactttatttgtgcagtgtatgtgctcagtggcttacttcgcttcttcaatgttatcaaatctgaccatgtgactgtaatgcatgttttcaagggcatctagttgcacgtttgaaaggccacctttcacagcaattctgaataccattaaaaagcaagtatcagaatccaaaggtggcattaaaacgccccaatggagagatgtatacactcagtagaagtctggaactattatcagatagatcacacgaatgcaggcaaaggacaatattgatatggaattacaagagcaaggtatagagacattgcctgtatgcttcttcataagcttgcaacgcaccagcccagtcaccacaagaatcaagaacattcccaatgttcacttttgctaatgcttgaccctaaaattgcacatatccaaggtgagagagattcaaaaactggaagctccaagtaaatgagtgcaaggaggaaagtagtcttattactaggtagcaactagcaagcatgccacatggcagcatgtccatgaatttaaggacatgtaagctcacctccaagtttccgattgatcgatacatattccagcttttcatgcaccatttacgagctttgctgaagtttctaagcttttggtaagattctcctataaccaaaagagagtcgctctgtttttccttgtcatggagttcatttgctaccctcttttgtcctttcgaaaattccttgagctgtgggaaacaaatagattacatgagaatgagacatgtgttcttctttaatcacacctcagtgccttgtctacgttatcgggggtatgcatattcatattcgacctgatctttttttaattttgattttcatgtgttctataatctcaatcccagaactcaagaagtacatgaagtgaacaattcattttccaaaacctaacaccataaaatacaccaaacagaactctgcatcgtggagttttatctagctctgataatgatggccaatttcaaactgttggtgtgacaggaaagtaaagatcattcattgccaatactgtacaagtgtacataagtaataagttttgcaatgatcattcaatattggttcttgtcatcaacaactctgaccaaataagataatttactaaagcattttcctttcaacaacctggcattaaacatagctaaaaacactacaaaattgagctattgtttctttacatatttccttctcttccatagattctactaatcgtagctggactcacttaggatgctatagttaattaagtttatggttaatctcagttgtccaacaagacacatgggaatcaagatgactattgaaatatttgtaagacttgtaagcaattatgtagagaaaaactcaaccagacagtcatgtgtaattacaacactgtgttgtgttctacaatggaatataaataaataacaactgagcatttcatgttaatactaagtataatgcaaatgcaggcaaaagcctacatgtagtcagcacataatttcatatgggtaaaggagttagtgcaaaacaaattcagcagagttgaagcttcaataatgcaagcactgaatacacatagttattagttaatgcatattaagttctaactccaacaataagcttcagaaaacatcgatacttccatcaggcaaagcaacaagacactattccctgaaccacagaacaatcccccacaataaaagactgaggaagtcaactttacgcattaactaatggaataacgcaatcaggttctttttctaacaaaaacagtaataaaataagatcataaacagaaaatagatccaactttaaagttaatatttgtggctaaagatcacatagttagttacccctcacttacttttggccatgcagttatcatccttgccttctccataagattagccagccaagcatactgctcaaggaggagcttcctctctttagatgttccacgagcattagaagtgtctctggcaagctttttcagcttctgctcgtatatcttcatttcctcaagtactttggctgctttggtaacagtttcaatattctgatggatttggtccattagtgcatcctcatcttccaagcactttgttatttgaagagctttattgtaacaaagctttgcatcttcatacttttgaacacgggaatggacctcccccagatttataaatccctttgcctcgccttgagtatggcgtatttttctacatatctctatgtccttctcaatatggcccttggctctgttccagttgcgtagttcaatataaacattacctagattgtgatggagcctactgcgagcatcgtcatactggtgtacctcttcctcatcacatatcttcagaccctgaacaagtaatttctcagcttcttcataattatccagttccagttcaagcatgcccatattattgtacgcatcaataagctcctttaggaagagagacttctgagacgatggattctcctttagaacccttgctagcttcatggatgatttgaaatatttcttggcattccgaatggcactgtgatcattctcagatcttagaaggatctcatagtaagttctgccaagctgggtgctacctctctgctgctcaacaaggtcatcagcctccttggcaagttgtaagtgcttcttctgtgaagaatcaaaacatcaatgaaaaatagaaatatggattcatgtaatagaaagaacatacatctactttgggttaacaagagaattatgttgagtgttagaaaaatagccaacagacgacatgaaacaggagatcagcacttaataccatgagttgagtgaacaaaatactccaaatgatcagatttgaacaggggtactcgtaagtctataacaggcctgagtacacacaacacatgctaacaattaggcattccccctcacttcacataaaagggtatctgattcacatggttggcacctcaaaggtttacatgcaaatttgatccgactaaaccaaccatatgggtcaaaacccataggcgaacctgagccagattgaataagatcaccaactaaccaaacatgcagacagtgagtgcaagattcacattttttttctcattttggtaataccacacaaataaacagcagaaaaaatatacatctcaacactggccatacccgaatccataacaatataaaatgtatagtccagcaaatgatccaaccatttgtgtacatttctacaagcaaagtccaccttaagtttgacaaagtaaagcataatatcaaagtgttggaaatttggtcataattcggcatattttaatccaaaataacaagataataaacatgatatttacaatgggatttgatccagtgaaagtggtgaatgtaatcaacatgagcatgcttaatgtagaataagcatcaacaatcacataataacacaatgttgacattgcgatgaacattaacagtaaaacttctaattgaaataatgtaagaaggttataccccaagaatggtcctccgctggagtttgaggcagtattgcctccattggtgttgacgggagcctccttctccttgtatccagtgttgccgttgtctccagtgttcgacatattggtgaaggtgaagtagatgttgacgaacagtgagtagtcgcgccttgcgcttcccaaaaacatgatcgcccgcccgtccgtacaaacgtcgcagcagcacgtggtttcggaggcctactctcccaacgcgtgtgcacacactcgtcgggatgggattaccgtagcagcaacagcgttggaaaatggatgaaagtgtgtctcactattcttgcgggagatcaaatccattctcattttataagagaaatggaagatgaagagtaagagtcatggaataggaagaggaatagagcaactaattgtcatcaactagccatgaaccatcctccactacacaaccatcaaccaacaatcaattaggagtaattgatgtaagttaccaatggaataggaagaggaatagagcaactaattgtcatcaactagccatgaaccatcctccactacacaaccatcaaccatccatcaattaggactaattgatataagttaccaattccctaatcaaatggattaattctcaaaactcttcatcccattgatatcccataaaagaatgaatacacatgaattcctagcataatgagccttagaatttatttgatttaattgatttaaatggatcaattacccaattaaatctaacacaaagtatatgcagcttaatctgatattcagctaaacattcaaatacttgactaaaccatttatatacagatgcaacaccaaatggcccaaagcatagtgggcgttgagatgagcaaaattctctgatacagtggcttctacagcataccttagcactaactcacacagaaacaaactataattgcatatacactataaaatgggacaaaccataatgcagattggtactactactagcaaatatttgtttgccggcagaccaaacaactcaatgcggaaattctactacaacttaacctacacctgcctataacgactcaggcatcagaaaacgtgatctgatcatatgcgtgtgatgcgaaatggaaggatcgtcgtaacctggtaggtgagggcctcggaggagttgccgaggcggaggtggacctcgccgagcgactggcaggaggggaggaggtggcgctgggggaggtacttgacagagacctcgtagtcgatccgcagccaccggagcgcctccacgtactccccccgccgcttgtggatgtcgccgatgacgttcgcccaccgcgcctcctcctcccggttcccctccgccaccgcctcccggtacccccgcttcgccgccttcagctcctcctcctcctccttcttccaccgtcccccgccgccgcgccccatcgccgccgctagggctccagctccagctcgattttccccttccttttttctcgtgcggattttggggatttcgagtgggcgcaaaatggaagcgaattctcccgccaaaatattggggaaggcaaggcacaggcacggcaccgcgccgtgttgttgggctgcgtttctgtgtgggcctttggtgaaatgacaacgtgggctccaagctattttgggcatttgcaattttgggcccataagagaagccctctaaataattctatttttcatgaatccatgcgcttcaaccgagcatggaataattctatttttcctccctcatctctagcccttgattgaagcgcatccctcaactgtaaaaacgggtataacatctcccccaacttcaaaaaccagttcaaattaactccttcactggttttggaagcggttttcaccgacgtggcaggttgacttggtctaaatgtattgacgtgacagcctagtcatcaaaagagttaaaaataaaagtggtaccacatgtggggtctacctgtcatcccccttctccttgtattcttccttcaggtttgggggcgacgtagaagatctcttctatgcgtggtgaccggccggcgggggttcttggattcggtctgcacgtacgtgggtggatgactggatgctgccgtggacgtggaggaaggaggtggaagcggcgtgggcggtatgcagggagccgcgtccaatcttctcgacgccggagctcacgcattctaccctgctgtcggtgcaccgttctcattctttgcttctgcaccagctgtactgcccgcagtcgccgtaccaagtcgtgccggtgctgtcgccggtggccttgcctgtgccgccgccgccgcagccggggttactggtatccgcggccgtgatggtggtggacggtccggccagctgcgccgtcgtgctgagcctagttccgcagcacgcgccggaggatgagatcgcccgcgcacgtctacttcttcgatctccgctccgccgagcacgccattacagggtccgtgagcagcagtgccggcttggctagctctacgttgccgccaacatgggactggccccacgacgacaaccgcaggttcgtccttggccaggctgtccgggcccacttcgtcgccgcctccaccatccctgacgacgatggcgcgcgctagccggggatccgccacttgtgcttggggcaggacggggacacgctccaacggcggtaggaggaggagttggggcggccgagaccgatgggggagaagagtgagcgactggccgggcggcgactccccctgcgcgcgccggccgtccactttgcccctcgcgtgctgctgtaaggtgagagaggaggtagaggaaagagagagaggagatgtgaagaagatgataggatggaagaggttattgacaggtggggctgtaagctgattcaatagggatgaaactacctcccaaaccgtggaaggaggcgatttacacgcctcttctcgtgctagcacaactcaacgtctagctaactgcatctaccttatatagacagattgtaacttttttcttcaaacttttaacttttctgtcgcatcgaatttttttacacatgcaaactttcaacttttctgtcacatcgttccaatttcttcatacttctaattttgacgtggaactaaacacagctataggacatgttcggctagcctacctgcagcagttcaaaccggctgcagcgtgcagccaattataattgtcctagcgccttcgaacagccaccataccctgtgttttaaaataaacaatctaatatatgatgtgatatttctagcattatgaatatgcacaaatccttatctagtcctttacatcgtatactaggttggtttattcaatggtggagggagtataagcttagagcatgcccagcagatcatctatctggccatccattatgtgtttggtgtatggaggcgagaaaataatactccagcagagtctccatcagacacaccatttttagatgtcctccaaaccaagcactccacaagtcaattttagcggttttctctcatcacgctatcctccaactactcagctgtgtgggtctacggtaaagaggaggtgtataccggaactcgcggtgaagatcgcgggagtaaaggcgataggcgaaatatttggcagggtcgcagggagattgccaaagtgccgcaccgccctcaacccacaccacttgtggcttctccgttctcactgctggttttctttaggcaaatgatgaggcccgtaacaactagattcatcttgtttttttaaaaaaaataaatgttgtgaatcttaggttctttaaatcacaagattaagaaacaggggaatagaaaaatgataggattttcaaggaatacaagtgcaatacaaataattggaaaacatagaaaaagcacgaaaaattatccttttattagaccacgagaaaaacacataaactggatgagagagatcggtagatttaaaggaaattttccatgagcctggatcacatgttaaaacttctccgaaacttgtgcggatcgagacattccttagaattttttataggattcaataatatctaaacggtgaaaaaaatcctataaaattgtaatcctatttcctatgttttccaaaggaccgtatccaacgccaaaagatcacgtgatacgaaggagataaattacgcacgtctaatatataatgctggggatttggttccttagaaatttaatactgtgatgtcaattactagtggttttatttaaattggatcatttctttatacatgaaattcaagatttgtagggtgtattctaaaaagccacaatatacgcctggatccgctgtagcctgtagtacgatggcaacttaaacagtcacaacatgtctgtttgatatgattttaagtaacagggtcatctgaaacatttttggctaaaaaagttactgtgattttacctagacaagctactactgtagcggaagatctgaacgcttgatgtaaaaatagggccgagtttagttttaaactttttcttcaaactttcaatttttccatcacatcaaaaaatttcatacacacgtagagttctaactttttcatcgtatcgttttaattttatataagaaccagaaccaaataaatgtcctattcttaactgcagcacatctcaatccgtccggacccatccattccccgtcccgttgcctgccgcgcagcgagagacatcccgtcctcgtcggcgccgctcccctcccctcccaccgtctctcctcgcacgtccccctttcctcccgatcgcaccatctctccaccctcccccgctcccgtagtcccgtagctctcttccacggccccctcccgaccgtgccatctcccctaggtggcgctgttggtcgcggttcttgagagttgagacgcacgcgagctgttcgacgttctgcccagatggacgggaaccgtaagcgcaagaccgttgacagcgactagcatggtcctcctgtcaagaaggcctcgacgggcacgcccggtgactcctccttttcccagttcggcggaggtgagtgcccaagaacatccgttgatgacttctcgttgggtgttggtgattcgactttttcttggatttcagttgccgatggacggaacgtcacctggacggcaccgagcacgaccgctgtgccgatggagtctataggacggatggatcgttcggccacccccagtcgcctagacggcaaccgctccgcaggcgcgtccgggcccctgcgcatctgaggtagataacaaaggaaaatccagcgcgccttgttctttcttccaagatcgagtgcacccctgttctttctttcttcttcgtactcctgtgaagcagcttttgttctgagtgtcctactcgccatttacttgtcccggttgcatatgttacaattcaaaaggctatattatctatgtgaaaatggtttgattttgttcctagcaatgttgtattcaaattgtcatgcaaaacatttattactagtttgtagtactactatttgtgagactgccccctctgaatgctgagagtggattaaagtggactttttcctcaatttctatgctctccagtttataaagaatgcctgaggttgcagctaattacctcaggcatctctattgttgttactttatatttggttcattagcacagtgatacaagttgaaccttggatgaattttcatatttgctaactgtgtttttcatttcccatcttaacttgacaagttatccgtgacacacactttgctgcatctttggcttccacttaaaatggcatttagtgtattcttgttgtttgtgcccttttatatgtcctcaatggatgtaactacctatctacatttctactattttccttcaaaaatatttttgctattaatattgttgctctagaaggttttgtttgtgaattgctcctgattagcatgcattgtcagtaagactaattgtgctgtatttgttgtgggattctaaaacattctatatctgtttaatctgcttttgataacatcggcctagcaaatacactatgcattttctattttattttgattaatgaattaatttgtaccctgctttagtcacgcctcatatggacagcatgatagctgaaagccacaactttagaaatctgcttgacttttgccttgtttgcttgaacatgatcatgagcagtctctcaagtaacactcactcttgataatagaagcagatgcctacttaacaatttagaaggcccttttatttttgtatttgtgagactatgccccctctgtatactgcatttgttggtaaatactgtgtaatttgttgcgtccgtgtgcagtggcggagccaaggcccagctaccacgggcaatggcccaggctctgcctggcacatgcagctgtgcatccatagattaacacttaattagcttgctaattacattgcttagttcactgctaggccgtatgaagcaactccacatcaacacatatgcttaacacaaacttataaagcaaatgctcatgttaaaatgatctatgaattatatagacttgtatattcttggtttgtttgttaggtttacccgagctcttaaaattttttgaatctgccactgccatgtggatatttacgtttctgattacctaggtatcttgttctgtctgttctgatagtattttgtatatcttctacattacacctagtggctttgtcagcaatcagcataattgatagtcccatttttctgtgtatataatcgactaacttcagtaatccttctgtttctcactatcacttaagaaccaatgcccctgctgggaaacagcaagcgctctgtgggcgcatccaggcccctgcgcatccaaggtgagtacctaatcgagcgcgcctcttgccctcttcttttttccaagattgaactcccctcttcgtgccattgtgaagttgttcttcttggttctggttggttagcggagagcagcagtgaggaaggccgcgtcgggctggggacacctgcaccatcacaacatccgttgcctggtggcgcactcacccgtcgtgtggatacctccaatctccaggaaccactgcccaccgctgtgtctaagctaccttctcaggacaaaaatggtgagtgttctactcgccatttgcctgaccttggtgcatctgttacaattcagaaggtccttttatttttgtgaaaatgatttgattttgcagttagcaatgttgtattcaaaatgccatgcaaacttgttgctagtagtttgtatttgtgagactacgccccctccgtatgtttcatatgttggtaaatactgtttaatttgtggtgtctgtgtgactatttacgtttctggttacctagggcttttgctacattgaattgatcaatgctcatcactgtcacttgagaacagatggcccaactagttagattataaattattttcactcagttcattcttacctgaaattaacattttgctgcagcttctgttattgtgatagttcccggatggtcttctgatgataataacttctcggaggcagtgaagaaactgttgtttggccgaataggggcagaccactcagttgatcaaaaggtgccaccgccagcagtgagaacagtgattgtacatatctttggtagatatggaccatatctagctcgtcatatggagggattgactgcgcaagcccatcttaggcgtcaagaaatgacatttgaaccaaatatgtgccacagaggtaactgcccgtaacggaactctgtgaaaagactctttattacaaaattgaaggctaatactgtcgctactggtctttctcatttattttcttttggttcaaaatgtttttttttcaggtataatcaaggagagagtggatgaactcttggagccagcgaggccttcctctccgaagtgctgttcttgcgatcggcctgctgactggataacatcatgctgctcgttgatgctatgctcgtattgcatgccggacaagtttcatcagaagcacaagcgaggacatagccgggaactctgccgcgcgcaaggtgccattggcctgctcaatccccggagtccgttggaggaggaaacgaggtacctgatgaaaaatgacatgctctgcaagcgagaaattattctacaggttgaggacgaggagagcgggagaacacgggagtgcgacattttcgtgctcagaagcatgttacctctggctgacctgtggaacaggaagcgcttaaacaggctattcacgtgtggctatcacatgaggtggaatggggtgctcgacgagctcttcagaacggagaacaagctatctttcatgaagtagcgagtagtaatagaggcttacgtttgttctgtatgcgattactagaaccgttgttcagtaactcagatctgttttctggtaccctgccttttggattgctcttcttttattgtctatgcgatgttattcagcttgcgaatcttgttgagacatgtaaccgttgcttaccattgctcatgttttctggtagctgagccttttggattttaaggtccggaagtttgtcttactttgatcgtatcgtttatgtacaaagtttctcatataaaaaaccatatatccaagttttcaaactctaacttcgacaccaaacactgtcaaaccggacgaaattaaaatttgagagaagcatcaaagttccacaacaaaaaatatatgcatgccatgcatatatttttttcccttcttattacttaacactattgcgtttgttacaattaaatcttcacaaaaaaaaatcttacatgattatattacgataaaaatatttatgtttgtaaattacttttaatatatacgtaagttacttttatcatatatataaattacttttagatttgactaaattacttcttatactttcataatgctctaagttgattatttttattattgcttttagtcaattttataatttatggactttaaatttaatttttagatagatcatatttttttccctacaacgaatttacttctaatgttgtaacaacttacttccattttatgctaagttacttttatggtttatgtaaattacttttacaccttattaaactagttaatttgcccctgctaacactaaggtgtcataatcttttctgatggattacatgctagcaaaaataatttacctgttatccatccaattgagctttaattcgatctatgtcgcataataaggcaaagtacaataattatattgcctaaaaatattaattcaagatcgtcaattatctaatcacttcaataccaatatatgagacaatatgcatccacacaaaaaaggtgaggataaataaaatattccaagcaattccaccgcttctcaatcatggtaccgataatacacagtattaacacatattgatatagtatcatgtaactggcaaaatctaaataactaacacactgacaccactacagtacaatgaacacattgagttatggaaacaacagtcatcacttcttccttttttccatatctctcattcagtcaaccatgatcccttttaatttgtagatctttatagacttctattttgttatcctctcctagagtaagatgtgtgcatccttacaagatcagtaaagatcagtgctctcagggtcatttgctttcgtaagacgcaatttatctacacactcttagagtgattgtcaaaataaaacactttagtaaaaaacaattagttctgtaaagaaaaataattgcctagtgccgttcaatgaaaagtcactctagtgctgttttccgttaaaaaaaattagtaccaattctaaatctaatgggtacttaaaaaattttaggtaccacggtagaagatcggttctgctcatggcctgctgcctgcgaaatgtaaggtcttccttttgtggctcacggcgcaggcgctgtacgttgttggatcgtagatgtcctggtcagcgagtgtggagattatgggtacctcatatccacacggcatagctatccgactagtcatagaggatagcttatatctatggaatatgtaaccgatcatgacttgggtattacgtttccttttatattatggagcggcctaaagtcctgatttgataatattataaaatagatttaggaaaccgataccgtattggttaaggtttctatattgtaatcatgccccccatcctatataaggtggggcaggaggccctctagggggcatgacacaaactgatcgtcagatcaatatacacccggcggattcaaatccccaaacaggagtagggtattacctctcatcgagagggcctgaacctgtctaaatcctttgtctccgcatccatccactttcaggtctcgtgcgctacccccttttcatattgccgaaaatttgtttcgacagttggcgcgccaggtaggggttgcgtcgagttacctgtcgacaagtgcgatggaatcaacttcatgagtcaccggcttcatcttcgcttcgggagttttttcgccgaccacttcaacatgctcctgctcttcgactcggatccaatctagccgggaagatcagtctcgacatgttcgatggattcaatttccaccgccgtcaatacctccatggaagacctcagtttaagatcaaataccatatacacatgccctgccgccgtcggaatccgatcattgccaggacgagtcccacgccaattatccgttcggcctaatttcaactcagctgcgattagccagacgcacaactcagctgcgattagccagacgcagaacgacgaaaggcagtcatctatccaatcggaatagtaatcgtgtgcgatttcgccatgtatacaatatacatgcatgtagcggagtccactgacaacagattgatctggaatcataattagcagactttgcagcacgtgtctccaattactgaagcaccagcatatatactatcgttattcccaggcagatttgtttgttttgggagcttggactttgccgccatgcataggcaacgttgtctaatatggagtaattaagattcatgcaactactacttgatttaatcaccggatggtattgatcaatccacctctgtccgagctgtacacgagtgcctgatctaaatgcacagagacacgtcgccaggaggacgagtcggcagagtcaaaccaacgagctgggcagacgtcgcatgctaccacatggatagaccggcgggagtgcgaagctgtttctccgttccctgacctcatcgttgccggcttgcctccgtcatcatcaccgccggcctgcctccgtcgccgccgaccggtgtcctcgcctatacggttggttggtcacaccaccgttcatgggcgtccacgtcttcaccgatcggccgcctcgtccgctgccgactggtgtttccgcctgcacggctggcctattatgccgctgttgttgggcgtctacgtcttcaccgaccggccgcctcgtccgccgccgactggtgtttccgcctgcacggctggcctattatgctgccgctgttgagcatctacgacttcaccgccggcctgcctctgccgccactgactggtgttttcgcctatacggttagcggactccgccgccgttaatgggcttcatcatctacaccactggcttggttccactggcgccgactggtgtttttgtcaccattgatggactgcttcgttcccacatcggctacttttgctgtcaccgagggaatacgacaaagctaagtcgtcatttattttattctttatatgatattttgccttttcctttgcctcactacatcaactggttcgccgttgactagtgagtcgggggctacagatgtgtatcatattttttaaacaattttcataatatttatcttgattgcttgcgacatattctgagtacaaaagtgcctatcgagttatggagttccatcttcctatgcttttcgtttggtttgctaattgatagttgcctttgggctgattcctagcacccgggggcttgttggatggatcgaataacgcaaggtgctaagtattattcggaataaatcaaaagcatagagataagataatttattttctgctcttaataattgcaaaagtacccgagtagtaaactccgacccgtgaaactttgttccattaatgacgaactcatgtcactcatatgcatgtttgggaagtgcttaggctgactcccggtgcatggtggctatgactagtcgggcagagtgtttaaacgtaatgagtcatctgctcggggaaatcaaaattgacaagagaagaaatacatatttataaatattttaaaatacttgaatttttctcgagtattatatttatatcagatactactcatcctatatgtttgttctgcaggatccagatccagatatgcataaaagggattcatggctataagcttatctcttacgctccaggaatggatcagtcagcacatcaccatcggcttgctgtcatcgcctgggtggtcacaccgtttttgttgggcgtctacaccttcaccaaccggccgccttgtccaccgccgactggtgttctcgcttatacggtcaggtggtcacaccgccgttgttgggcatctacgtcttcaccgaccggcttaccttcgccgccgccaactggtgtctccgcttgcacggctggcctactatgccgctgttgttgggcgtctacaccttcaccaaccggccgccttatccgccgccgactggtgtctccgctgcacgactggcctattatgccaccgttgttggacgtctacatcttcaccgaccagccacttcgtatgacgccaattggcgctatcgtcttcacggctggccacgtcgccaccatcgctaataggcgtcatcatcttcaacacaagctgtctacatctgctgccgactggtttcttcacttccatggctgcatgattttgctagtgttgattggccttatcgtcttcaccgtcggtcatctcgtctgcagctgactagtgcactcgcctctacgtctggtttacaccgctaccactattgatggacgtcatcatcttccgtcgccgacttgttaagtcgccgccgactgatatttttatcttcacaactacgcgtcttcgcaaccggtttgcttccgttgccgccgactcgtgttcacttcatcacggctatgcaactttgttaccatggtggagctacttcatcttcattgtcttcggcaccggtttctactcggacatctttaacatgtatcttcactcaagtgatggccacttgacgacaagctacagttctcgactctatgttcagttgtttcccaactaaccaaagagtcgggggctacacaaatacaagactctcaaaattcgacaagctgaagcaatcaattaatcagccaacgagtcaattccaggagtcattatcttcgtctttgctttagagcagagttatcaaccaatcagctcagtttcgacgagttggacaacatcatctactttcctccaagtgaagcatctgcaacagctataacaccaatttgatggattattgtcactgacatcatcaccagcacctctgcttcatcggccctgacatcaactctgttgctaatggatgactatgtcttcgccgacttattatttcactttcacggttgctatcgactggatcaccgacatcgttatcttcatcaacatcctgtcaagcctattcaacatagcccactctactgctattgatgggcaacttcgtcattatatttgattatctatgattgctgcttatcatcattactgtcggttgcgtttgtcatcgctgactattttcttcatcttcatgattggtggatttcgtcatcgcctttgatgcgtgtctacatcttcaccgttggcttgctttcgtcaccaccgaccggtatcctcgccttcatggatggcttattatgtcgccactaatgggcatcttcatcttcttcaccagctgccttgtctgtcatcgactgattatttcactgccatggctacacaactttatcgctgggcgccttcatcttcattgctggctgccctgactgctgccgactggtttctttgccttcacggttgtgcaacttcatcacttttgattggtatcactatcttcactaccaccaatattttttccacctctggtgagcaatattctctctatattggtcatcttgtctctatgccaattgcgtcagctaccatcaatggacaattgtgactacgacagaaggacaagctatatgctcaggggcttactagctcaaacacaagtatcataccttcaatttggacttgtttcggatacattcaacatggatttatagtcatgagtttattttctatgctcaaagactggaccaattactattccccgtaaggactatcaactgaatacttgcgccagtcgggatttaattattatatctattttggagtatcccataagggataatcactcagatcagaagctattcatatgagctacacttggtctacattacctagaagacttattacttgggagcatgttacatgtgtcatcctttaaagggtgtcgaagtcatattttttggcctaggcctaatatgtctgcagcccatattttgaggtgtggccagtcacgttcttttagggacttaggcactttttgcttaggccaaagtgcgtgtgatctagtgcccaataccttaaagtccttttataccgcagttactcaactttttaggagttggtacaatgcatcttaaaaggtgtcaaacagtaaagctttatatagctgccccgctgacttttttatatagtcatggcactgtttgggtttatcaagcaattgattggatacaacataattgctttttgccacgtaagtgtgcatttttattgaccaatattatggcttaggctgattatatattttggtcattttccagatgattgataaatccttatgagtttatttactcggattttataccacatatgccatatatttccaggtgtggtgaaaccatgtgtcttttagggactcaagcacatctgttaaagcagtgtgcgcatggtgtatgcccaatactttggaaatttatttattcacaacatacaagcttctttatagctgttttgctatgtgtattcaatgatgtagtcagctttagattgcacgcatcatattttacaaagcagtcggtatatcactcggatcatgttattcaaggattcacaccgcatatgctatatattaatattaagtcacttggttgactacaattatcaaaaccactcagttggtgcctctattaggtacatctattcgatgcacctgactttatttttcagccctccacaatcttcatatttggtaaaagtactcgggggatcatggcaaagatgattgaagcactcggttttggagtaatctagttcgaaagaagattatctttccgactgtgaaggtctccggggctactgtggagattatgggtaccccatacccacacggcatggctatccgactagtcatagaggatagcttatatctatggaatatgtaaccgatcatgacttgggtattacgtttccttttatattatggagcggcctaaagtcttgatttgataatattgtaaaatagatttaggaaaccgataccgtattggttaaggtttctatcttgtaatcctgctcccatcctatataaggtggggcaggaggccctctagggggcatgacacaaactgatcgtcagatcaatatacacccggcggattcaaatccccaaacaggagtagggtattacctctcatcgagagggtctgaacctgtctaaatcctttgtctccgcatccatccactttcaggtctcgtacgctaccccttttcatattgccgaaaatttgtttcgacagcgaggaatcaagtcatcaactgccttacctcctgtcctttctatgcgcaagaattggagacggtaaaccatatcctcggtaagtttggtttcaattgctgtccatggcggggaggctggaaattgcaccccaaccatggctgcttgatccaagatggtgggcttaattgaggatgcggttgacgaaacgtcatcgtacgtcggaatctcgactcgcagatcttgcgtttcttcgactatgtcttcggtttcctccgtcatcatcctcatccgattggaagggcgccagtggttgctcgatagtgtggttcatttgggggagtagtagctttcggctgttgtttttgcattcattttggggagtagtagctttttaactaggatttgcaatctcttcctttcgacttactccctttgtcatataaaaaattaaattctaggtatgaatacagacatccctaggatttgagtttttttcacagagagagtagccagtaattcctagttcgtttttcttctatcctgttcaccctggttgcgatggctgcccggatgtcgtgtcgtgtaaaactttcatttgctccttgtaatatgatgtgtaattttttttgtgtaattttttgtgtatttctttgtgcattgtggaaaaacttaatccatcaatgaccgccatgcaactcctaagaatgtcatgattggagggagaatggattctagttccttgagaggatgttcgaacccataaccaggcggatggaggggataactattcttagttacagcagaggaaaaaaaccttgtgtagaatttttctcttaaattcaatgcaaatgactttcaaaaatctagaaaaaacgggaattgttttgatccctcactgagacattcccttgtttgtttaaaaatcaatcaaaatagttagaactcggccttagtcaccgacatgcaactatccttttgcagttgatttctctacatacacacagagaggggaattcattccgcggtgcggagctcaaggtcaagtcgcggagaccgttcaagtagctgaactagtaagagcaagttctattgtagaaatttatggtgcaaggccaagttatagatgtgtgataaaaaaaatagtactcactctttttcatattataagttgtgtttgatattttttccctagtcaaacatttttaggtttgactaaatttataaaaatatatattaatatttttaacacaaaacaaacatattatcaaaatatatttaatgttagatttaatgaaactaatttgatattttaaatgttgctaaatttttctataaacttggtcaaacttaacaaagttttattaaaaaaagtcaaacgacttatagtataaaacggagggattagaattttaatacttgtatagatcgaatttgagtctacataagtgttatatattgatctatcgtgatgaattctttcaaaaacattttaagtgacatgaaaaaaatgagggccgtcccataagggatgattattagacttttccctaatccaggggacaatcagcaacctgattatactggcgagagcaaggtgaaacaaaacaacacatcccagacactctcctatccaatcagcagagttcaagtgttcaactcactaaccaaaacaaagtgtcagggtactccacaatcctcaccaccattattattgatgctatggcaacagaacagaaacaaccttcagatgaaaagatgataaccagcagcctgcagactcatgcagacgagttcacaccctgaattcgctggaatcaattatctcaggaacgcagtcaagtcaacaaaaaatcagcgtgatttttgcaaggaagcatgaaaatcgtttaactcaggaacgcagtcatgccaacaaaaaatcaatcatctcaggaacgcagtcaagtcaacaaaaaatcaatgatcgatgcaagaaagcatgaaaatcgtttacccgcacaattgtagtatcacgggagtaaccaagtcggagaggagtgggcagacgatgcgcgctgctccgagaaacagcgatgaacgtgcccgtcgcaccacctcccgttgtcgctgcagggataacggcgatgtccctcatcgcggaagggcatgccctcatcggcgtaaacgtagtcatccaggaagtagacaccctccttgagtcccagcccaagctcaggataggcagatgattcatacgatctggagcagccacgcccgacgaagaatagacgcccatccagcgactccagttcggtccaggtgtcctcaattttctccacgccggtgtagtcctgcaccatctcctgaaccatctcgaacaccttgaataggcttgtgggagaacgtggccgagctgcaaatctcacaatcatcagaagcttggcccgggactccacgagatagcgcgcatggacatgttcgcgcaagcgctcccggtgccggatgcgctgaacagactctgtagtgccttggaggccaccatctgcgtagaacatggggatacaggtgacgaggaatcccctcctcgtcacgaaccggaaggcgccatcctgatagatgacatcctgtatctcatctctgagtctgactgttgagtcgggcgccattgttccttcgacggcaacacgatctcccatacgccagaaggcgagacggcacgagccggcgatgagatcccagcgcatgacgatgcccgcgccaatgcagctcgtgccgcctggggaagaggagagtgctgctgccagtataaccatgttctgtgcgcgctggtagtcgtcctcgtcctgatacgagcggagcaggtcggggaaaggaatcaagctgctcttggaatcctcgcgtgaccggaggttgatcatggcgtgaagtcgattgtgctcgaaggcgacgaacagccaccctccctcatgcgagccgaagcagcgcgccccgtgcgcggggctgaggcggtggtgaagactgcagcggtcgatcccgcagtagaagcagtagacgtggatgaaatcatcgccggcggatgggaggagtaaccaagggagagggcgcggcggcgagggaggcggcgtgggctcggcgagtgcgccgcgccatgtcctgcagacgtcggccgcagcatcgcggtccgcgacacatcgcaaatggcggaagatctcccgcagcaaatcagccggcaaatccgccatagtaggcgcaggcgagggctccatctccatgggagccgggaggggtaggggtggaggagagggtttggaggattcggcggttggtggatggaagggaagggaaggggaggggagctgtggccaagcgacgctgtactagtaggagtacttatgttcgttgcccctgcctggcgttcttctgcttctagaagcaaagtgaggctgggcctgggcctgggcctggaagggcagaggcgttcttctgcttttagaaagcgaaactgctgttcggcgaccggtcgcgcgcgcgcgcgactggacacgtgtcgcatgcggagaggggcgccggacggcgcgccgcgcgggaggagctccgtgttttccgtttttttttcttttcggtttctcttttttttctgtttttctttcgtattttttcggtttcgtttttctttttttctttttttctttccgtatttttttcgtttttaatacgtatgtatgcaaactttgtatacgtaaaaatataaactttgtatacgcatatataaagtttgtatacacgtatgcaaactttgtgtacgcatatataagggttgtatatgtgtatgcaaactttgtatacgtgtactttttgggtttttatatgtacgtatacaattttgtatatatgtatacaaagtttatatacacatatataaagtttgtgtacatatgtttttttaggtttttatacatacgtatacaaattttgtatacacgtatataaagtttgtatgcatatatataaagtttatatacacgtttttttaggttttttaatgtatatatatattttttatagtagtagtactaatagtagtaatagtagactagtagtagtaatatattaaatagtagtagtaaaaggtactagcatcagtcgcgcgtggccccaggcacgcgattagtcgtgcattaggcgccccctttagaaaggggatagtagtatctatagatttgtcctgctaaaagcagagctcagattttttttaaagatattatttgtgtacgacattttcggaaataatgctccgaatcatggtattacactacgagccctattctaaaatataagtatttttaagatggtcacatatattaaaaagtagatagagataatttgagaaatgttataattggttgagatgaaaaggtaggtaaaaaaaaggaaaaatggttgagaggaggagataggtagagaaatagttttattttaaaataagatgtattagaaataactaaattctgaaactcagcatttggttcccaacatttggtaccgaactcagcctaagcactgaatcagctccactaaaaaagaaaagcgaggaacaaaatgggctttcctgctctcaagaaactaacaaaatttctagtgagtccaagaatattgtaagtcatgcaggatttgctaggactaggatgcatgcatatgctactccatcaatcggaaccaggcaagggtgttcgtggagtcaccttcaattcttcatctccaccgttccacccgaccacaaccgtcgtggaaatctttgcacattgttgtcgttgacacattaaccgtcaaaaggaaccctacttataaaatttaatagaacttgtacaagatgacatggtcgccacaaagatgcacaattccgagaagaaacaacaacaatctttgcagacagccagagacaatctcatgggccatagtaaatgggagcaacaacggtttagttatacaccatgtattttggagtcgcgctgaacttctgataccctttgatgaccttgtttacagcatcaaggaagtccttctcagtcactgttttccgtcgggcgcgaatcgcatacatgccagcttctgtgcagacactccttatatcagctcctgtaacagcaaacaggagtttgtgagaacaaagcttagcattatccgcttttgaggtggagactataacaaacaaatctagaagaaaccacccagaacgaagtttcaaagttcttccagttaccagttgagttggggcagaggcgagccagcagctcgaaacggatatcgcgctcacagttcatggtgcgtgtatgtatcttgaatatttgggtacggccctccaggtcaggtaagccaaattctaccttcctgtccaaacgaccaggacgtagaagtgcaggatctaaggtatcaggcctgacaaaacaagaaaatgtggtcagcttctcagctctactcatgtggcgatagtcctgaacacatgcagatgtttaaagataaatagctacacagtatgatatgcaatacctgtttgtggccatcagaaccttgatgtttcccctcgcatcaaacccatcgagttggttcacaatttccaacatggtacgctgaacctcattatcacccccaaccccatcatcgaagcgagcacctccaatagcatcaacctcatcaaagaagacaatgcatgctttcttcgagcgggccatctaaaccaagtcaacattttttttttcagaaacatgcttgtcaaacagaagcactttaagtgcagaaaattgataagttcttgtgagttttcacaatgttgcacatacctgaaataattcccggaccatccgtgccccttcaccaacatatttttgaactaactcactgccaattacacggataaaacaagcatctgtacgattggccactgctctagcaagaagtgttttgccagttccaggagggccatagcaaaggaccccctttggaggatcaataccaagcttgacaaacttctctgggtgaagcatgggaagctcaacaacctatgaacaaacaataattagcaaacagtaaatagcaaaataagtccaaaactaactagcctgatgcacaaggatgagcaagtttgcacgacaagggatatgaactgaaaaaagattagtatacctcccgcattttttcaatctgttccttgcaaccacccacatcattatatgtcacatcaggtttttcctcaactgtcatcatggtaacacttgggtcaattttgggtggcaaaggaatttgaatctggtacttgttccgatcaacactgcattaaacgtgagatgaatttatacagtgagtacagtggttcaacagacctagaacaatgacatacaaactatatatgatatagaaggcatatgacttgtccagaaaaaagcatgcatgcatcagatgcttttttcttcttagcttaatcagctttgctatctctaaagcttacatgttacagttcatcttctgtcgcaggaatggacaaatggtgctactagtactattggtaaacgcaaaggaacagaaaattagtgaagtatatctaccaaactttgtatatgttataccctggattcaaataagcaatattctcttctatgtcaaacatgtaaggtttgttgaactataatctactcttgtttccatgacaccatatatgctgtcaatgaattaacaccattgcattgaggaagtgtgcatactattgggttaatatattagagcttgttttggtctaacgcaaaaatgcatcaaaaaaaggtggaaacagcagatcgaattgcatgagatagaattcagggagaataatatgatacatcaaagaccaaaaaaacagcagtgacctaccccactctcatcccttcctcaatgtcagttggagaaactttatcccctaggccaaccacaaactgaatgatacaaaatacagtatgagaaagggatcaacacattttttttcatgaaagatatggtttcaataaaattggataagcatggaatacctttgcaatttgttttacattaatcacatatttagcatcatcagtattaggacttataatcttggtacacctagccaccttcaaaaggaggaaaatatcttgtcagtaaaatcacagaagacataaaactaaagcaggaaatctaagtccttaggcatcatgcatgaagtatgctaggcacaaaactattaaaacaaggaagaaggtaggcggggaaataggttaagcgatatacttgcagcggttgctcttcttgcatcatctgcttatctgatactagatcccattggctgggtggtgccagcccagtgtcagactccttaatccctgggatttaatgaaagagtatatcagtcagatagaccaattaacatgtgctaaactcctagcatctaaacaagctgacaaactgaacaatgatgtgaaaggtaagagggtgtttgaacatgagacaaggttgctatacagtgcacattacgacgtcaaatttctagtacaagaacaaatttggaggtatatcgcacattatataagcccacatagagcaccagaattgtactcttgtcatcaatgaacaaagagtgatcaatatgatataaaacattcctacagtggggaatggccaaacccactaaacaatcaaaatgtgctatagcaaataggaaagcatcagtgtgttcgataaaatttatctcactatgctatcacatgaaagtacacagctgaactaaaagaaaattacttagcaaattgagctacatctccagttccaaccaagaattagacgaaaaattcttaactcaccacaaaggtcattgatcttcttagccatttcttttatttctttctccaccttcttaatgcttgtggagtatggcccaagcccctgcgcaacaacaaccagacagccagaatcagcaaacttcattaatagaaaccacgcagcaccaaacaaagtattaatcctctccactaaaaccgagcttttcacggcgaagaagaagaagaaaacgagagaaacaaacatttcgccttccgcgagaaacccaaaccatccgctgaacaacatcagcctcaaccgccgacaaaagaggcacacacacaaatcgaaaccctagaactacccccaaccacaagctaaccccagcccgaggcccgagcccaccatgggaccagatcaccagaaagcacccctagatgggaagagatcagggagatctagcggggggacactcacgtaggtcttgaggagagcgatgtcgtcctcgtcgagcgggcgggggttcttctcgttcatgatgtcgtcttccggctccggcgccatggctccccgccgcttccgccgctgctgccgctgcgcgtcttctccggcggcggcgagaggcgcttcaggtggagtcgtggagagaaggtgggggtgcgaatgcgagagaagagagaagctcgcgtggatgcggggagtttattttctcctccttttttttctttttatttggccttttttttctttcctcctccgcaaggatccctctccgccgcccgatgctgatcggacggtgtaaatctttctaggcctgtctagagttggtctgtgtccttggctcgttgcggcaatgggcttttttttttcgtcttggagggctgagcttaggatttatttagtttggttttcgtgttcgattccgaaacgaactgatcaaagcttaggtcttctttggaaccaagtcggaatttgaattaaacatgtggaaatacagtaaaattcgtgcgttttcgaaaaggcctctgcatgatttcggggaatactgctactgggtactcctgggaggagaatagaacttaggaaaagaatagtgtacgtaaacatgatattgcacaaaagctcccaggtttcaaattcttcaaatttgatacaatccagacaatgaaagcaacaaggattccaggacaagacgattatgggatcaaactaagctaatcttttcattgcattatagtgtcagacagctacaaagagaagcaatcttcgactcttcgtcaggttattgtccggaccatctgactggagccggtgcactgacgaaatggacctgcaagttctgggcatgccctgaaaagaaaatggcaggtgttgctcaacatgaacagaccacgataactatacagcagtggacataaggaagtaaggaaccttgtatgaggataatgctgaacatgatttgcttacatgggaaccataatcaggttgccgcaccacagcatcggagaagaaggcaaacgccaaacatcggagaagaattagccatgccgtttccgcgagatgagtcaactgataaatggagtactgaatctgactgtaacagaagaattttcaatgtcagttcactcaaacaattcaatacactcaaaaatcacaattactcctgggtgtttttattcttcaggttgtgtattgagttactgattgcaaatacggagtaacatccagtatcgaatttggattgaaaagagtgaactttacctagtattgatgaattcagactgcaacattcgagtgaacagcacgagcatccctacagaccaccatctcttcaaagcctttctgtagttttgcagtttttctctgctccaggcattctgcataggcttgatatgcatttccatggtcatgtggtctccctcagcctctcaaaaatcttcctaactgcctctgcttaaacagaaaatatggtaagaaagacaatcaagaaattaacctgcaactattataaaatataatttccacatacataatgcaagatatccaaaattctcagggaaaattttcagtacttttaaactttttaacatcaagaaaacaagactattatctaaaaatctagaaaacaagactggttccattgcatcatagtgaccacaaccaacatttcttccaaacacatgagctcattggacattattaatgccttggaagtacattggattgtatcaagcccatctaacgcccaactggacgtaatgttcaatgataaccatcctgcagtagatttgacattaatttacagtcttgaggcaaaaactcaaaacccaaactctagggtgaattgccattcgaatatcagtactgccacagaaaaatccagacattttttagataatgggcagcgcccggcctctgcatcataagatgaatgcacatggccaatgaaaaatccagacataagctttcagtgatgaagtttggtacttcagagttttctaccgtatgtaaaattttaatagggatggagtatttaaaattttaatagggtaactctaagtaacagatgtaactggaaagaaaatgatgaatggcaaatttagagcactataaatggcatgtaaataagactaaagtaacttacctcaccttgcaggtttgagatggtgctggcttaaaagagatttgcttctatgatggaaaataagaatagataaatgtacccaattgtttacatacacacaaagatgccaccaacaattcaatcgactcgactgatgattgcaccccacttgaatcaagggtgtgacaaaacaaaagcccacaggtacaaaatgtgaaattgtgctagcagataatagtttttcaagcctgtaggagtactttggtgaggtacttcatttgttgaaacaagttagcttatacagaaaaaacaagttcagcgtaagatgatttgttatacaccagcattaactactgccacggaaatgaatctacttatcagctataggcaacaggtattggagtgcagccttccttttacaacattttgttctgtagattcacaatttgataccagcatctgaagcaacaaggaaataataatacttgaacaaattaaaatatatcatcagcatcatttcggtgtatttttcagatgctcatttttcatcctttcagcaatcctaaagaatgtctaaatgtacataatagaacgttctgaaagtaaggcggcacaagcacaagcacaagcagtgtcaaacatgcataattgtgttgcaaggacaaaatcgattaactgaaatacaatacagtaaattactcaacatgaaagcgaagaagataaatccctaggcgccaccaacacactacactagcaagcttggtactaatccccaatcccctccaatcatggatggattaacgcgattagattcagttgtcatccccataggcgaggaatcggtagcgctcctcgtaaggcccgtcgaagtacaggtcggcctcgaaccacttggggtaccggacgaggtcgccggcgacgaagtgcatgtactcctcgccggtggtggcctcggccgggagcacgcggacctcgccggagacgatgtagacgagctggtccacgtgccagtcccagggcatccggcaccgcccgcccgtccgccacgtggaccacgtctccatcgcccgcagcgcctccgcccgctcccgcgccgccgcgccgcgctccacccgcaccttgtatacctcctccagcggccgccgacccaccaccgacacgtgcccggctgctgccgctgccgctgcggcgcctcgtgctagccgtcgaggaggcgcgccgcatggccggctcgccgtggggaggaggaggtggtggcatccggccgtggctgcggtggcgggactcattttttgccttgagcctttctctgatctccggtgatggtactctggctgtgcgcccagcttccagcctgccctcttatccagttaaccaacggaaaaataaatgaaaattaacaattctttttacaattttcccacggccgtgtaaatcaaatttagtcttgttcagttttttttttaaaaaaaaagtagacttgtttgtataaaggcactattccctccagtcaaaacttatatttgccattttaccatcttatacgattttggaaaaaaaatgtgatggttttatgagaccatgaaagtatttataagatatataaatctatatatatcattgtgtgtcctttttagctgctccctccatttgaggttataagatgttttgacgttagttaaagtcaaactgctttaagtttgactaaatttataaacaaatatagtaatatttacattatcaaattagttttattgaattaataattaaatatattttaataataaatttatcttggtcgaaaatattattatttttttctataaacttggtcaaacttgaaacagtttgactttaaccaaagttaaaacattttataacctgaaacagatggagtaagtattttgaaagatagtcacgagtttaaaaaaatattaactcaatgttgtgcaaacacattactattgtaacttttggatatgacatttgactactcgttttattaaaaaatattatatattagagaaaattaaataatgcttgcatagtatctttttttaatggaacaaatgatctcatgtttaaaaaccaatctattattatattattaaaggaatagaaaaatgagcctccacgttcgctctcatggcctagaaattctcacattaatctgacaaaaagaaaaagcagagtccatatagaaatacaatttacaaatagctgaaattcggaattaaaaataaggaaaattataagtagagtatagagttcatatagaaatacaattaggaaataactgaaattcggaattaaaaataaggaatattagaaatagagtataaagtccatatagaaatataattaggaaacaatagaaatgtggaattaaaaataaggaatattagaagtagagtatagagttcatatagaaatacaattaaggaaaaaaaatagaaattcagaattaaaaaataagaaatattagaagtagagtatagagttcatataggaatttaaaactaactaaaatttggaataaacataataaaatttaaaactaactaaaatttgaaataaaaataataaaatttaaagtagagtttagagtccgtataaaaatacaatttaaaaataactaaaattgaaaattaagaaaaacatgggaagaagagtttaaagtcaatataggaatacaatttagaagtaaatgaaattcgaaattaaaaattaaagaatattgaaagatgagtttagagtccacatagaaacacaattagaaataataaaaattcagaaataaaaataaataatattgaaagaagagcttagagtctatatagaaatacaatttacagaaaattcggaattaaaaaaaagaaatattaaaagacgagtctagagtccatataggaatatatataatctacaaataactaaaatttgatattaaaaataattaataactaacatgtatataaaatacaatatgaatattacacattagtagttttgtaaagttattgcaaaatttaaaattgtgttgtcattttaatatatttgaataatataatgagaaaacatgtatgctattatatgaaaaaaaatataatgatactagccacgcaatctgcgcgggccaccatgctagttgcctcgtatatttagaaacatttaaaacagagtttgttactatactaattttcaaccttatcaaaatttgacaacgtggcaatccaaacatatctaaatgtccttccgtaccaacatcagatgatcacaaaacaatttggtaagacatatcaaaccaaaactgtcccagcaacattatcatggctactcaacttcatgatttgcatactctacaatttccttttgagttatcatctgtgtatttgaatcaagtgttcattacaaactgatggggattaaaggaggaaaaaggaaaataatttctgcaaaatgtcgaataatacccaaaaaaatatatatagtagaaaccatttcattccccaaaattaaccaacaatgtataacgcatgtccaattccaatcgatggatcctctgtttctagtttatcttgtagaactttgagggctcgaggcccttggtgaagttgaagtacttgagcgtctcggcccagcgcgggttgtccttgaggcggtggacggcgatggtgtccgggataaactcgtgcgagcacttgtccaccggcgccggcagcgggtagtcgtacatggccggcttggcgttgaacctgttcttccctctccccccgagccgcagccactgccccgtcatcctgtcctccggccccacggtgcggttgcgcggcacgtcggaggtcgccacccactcgacgacgtcccacgacagcgcgtacgccatgccggacatgtactccctgaacgggtccatgctgccgcacgggatggtggcgccgtagtacgcgtcctcccgcggcatcgcgcccagggaggccagcagccgcggcagccggaggaagatgtcgtcgtcggccttcatcacgtagtcgtaggggtcgtcggcgtacagccgcgccgccgcggagaagaaggcgtacgtcttgccgccgttgaggttctcctcgcactcgtcgaggacgatgatgtcgccgtggcggaggatctcgagcgggacgaggacgcgctggtcgtccttgtagaggcggcagaagacgaagcggacgtcgacgtgcgcggtcaggtcgccggcggcgagctggaggccgtacaccatgcgaaggaggtgccggcgctcgtagttgtcggcgcgggtgagcacgccgatgaggaggcggaagtcgggcttccgcgacgccggtggctccccggcgaggcggcgcggcgccgccgtgtacgcccccgccgccgtcgtcggcccgcacgagctcatcatgagcgcctgcagctcgaactccttggggtagacgaagaggtagatgaacccgaggagcagcagcggcagcagcaccagcgccttgcttgacgccgacagcttggggaagccatgcttagagctcttcgccggcggcatggcaggcaagagctcgagctcgacacagtcgtcgtcgtcttcgtcgtcgttgctgctgcgattcaagaagctctccttgtgatccagagattgctgtgaattgaattgtaaatgcgtgcaattgggtggcgcgagtgatatgatgctaaggcggaggcggatcgccggtgctttggccggtttgagatggagctccatgtgcgtgacgggggagcttggtttgtacggcaatggcgccctttgcgtaaatcttggggacacgagaggcgtacgtgggactgcgtggcatgcgaggtagtcaacgcctacagattacagtacaacgaacgcgtcggattgcatggattcacgctgcggcggatgaataaactagataaaaatatagccccttgatatctacatgtagcaaaaaagatttagctacggaggctcctatagtacttgttccagtggtgggggttcgagaccccaccgcccctatactggattcgtccttggattcacgcagttggcgtttcacaggatcacacagcttattaactcgtcaggagggattaatttggagatgcacttgatagagtagtggaaagtagtgtgaggttcaatcctcaagtatcgttttcaatccctaatatactcatatattttttgttgaaaaatgtttggaggtaccgtataggctaattaactgatcaggtgtgtgtttttggatttcaattttgagatttgggaattcagtaaaccgtgagcgatggcattttacagggttaattatttgttgctcgtttacctatgatccacattggcatatcactatatcggtacattttttttcatttttttgcttctttaatttgcttgcggcatatgcaggagttagatggctgtatatatgagtcaagattcaaagtccaaactgatactttgacaactcaatggcgccttgcgtgacaaagagaccactgccgcgatactcagggcatcttgaacctgaacaagcttaatcagtgcctttgctaaatcttgacggcagctagcatagcacaacatgattgcatttgtaatcaattttgtataatgcacatgccgcacatagatttacacgaacgcaacgtcaaccaggctagagaagattttgtataatagttagtagtaatttcgattgcttgaatgaaataaagcacccaggaggccaggagcgaactacagtatatatctatcagtttgcacctacttgctcagactgctccgtccctctgcatctttcaggtgcgtcatgcgtgcgtgcgtctcgccggctcgccgctgtccatgtgttccccgtgcagttgagcgcgatgacgatgtcgccgtcgacgccgtgggcgatgttctcgagcaccgccggtgccgcgtcctcctccgatcctccactgggtgaggttgcacacggggaagatgacggtgcaagcagccaagcaggcaccgacgagagtacaagtcggctcaggtgagcacgccgagcagcagcgaacagaagtgatggtttgttgccttgttgccgtcggcaggccaccaacgctgggcggcgggatttttcacgacggggaggaagaaatcaatgtgggatgagaagacagcgaaatggaccatggcccatgggccgggaaagggagcacttgagagagaggccagagggccatggcatcaaaccctcatttcaatcggttaatatgtatgggtctgtttggcacagctccagttttagaagaaatggagtttgagcttagccaaacagtttcagctctatctaaaatgggagcaaagctaggtggagcgttctcacagaatgaactagagaggtggagctgggtttagactgttccacaactccactctagacccaactcaatttaggagttggagctctactaaacagatcctagtccctccgtcgtatattgatgtaacatcgtagtactacgaatttgtatgtgttcatgtttagattcgtagtattagaatatgtcacatcgatgtacgaggttggtttattttagaatggagggagtatgcctcaatactatttttgtggattctttccggtaggatttcgtgttgaaactagatctcatacaagactcgggtcttgctgctctctccttattaattgtactatcatcttaccttttatcctacatgacctgctatagtgtgatagactctagcaaatgtgaagcactagaaatgaccttagagaaagactaataatacaattagctgcttactgtatagaattttttttacgaagaagagcaaagatatattactcaaccaacagagtccttacagagaatgtgagatatttggctacaagaatcagagagatgatcaacacgagctttactaacatatggctggcttgattctgggatctctgtatcttcttcatagttactcccctctcatcatgcaacaaacaaatctttatagtctacctctcagccaactcatataagtggttagctatgaactataaatgtatggtccacctgtctctctcacatattttcttggttcctgtacgtaagccggctataagcttacacccgcttctcctctctctcctctcctctctcatccacctcagtatttagcattcttacaacatcctattatacttgctcttattaggttgtgggatgatttgaagatagagagaagaagagcaccgtttagatcggtggtggagaaacaagatgaccagatcggtggtaatggcaattcagtcctgttttgggaggataattggggaggaaggaccagatcgcagcagtatcctagactgttctcttttgcgaagaataaacttgattcagttgtttcctacttctctagagacctgcatgacaactttcaccttactctctcagttcaggctttccaggaatatgaggtttttgagcaggaactatctgccattcacctttcgataaaccatgatgtatggattttatgtttggagcacggcacaatatacttccagcaggttctacaaattgcttttctggagcatctccccccagcaactttacctttaatttggaaaagcaaagttatgatgaaaatcaaggtgtttggttggttatttctgatggacagagtaaatacaatggatcttttggatagaaaacactgcaagcctcccaatgcttccatcatttgtcaatcttttcagagcaatcaaagagagactatggaacatatgttcttctcttgtcaatttagtgcgggttgctggagttctattggtttccattggaactttaatctcagttttcatgatatgattcttcaccagagagcaaattttgggactctgtgtttcatggaaatcttcctcttagcggcttggaatatttggaaacacaagaataatctggtcttcaattctatcatgccctcgaccttaagctggaaatctgctcttaaagatgacctaagtctacatttacttagacttagagatgaccaaactctttttattcagtcatggatgtctcccttgtaatttctttgtaatttagtctttttgtactctcaactctttcataatatataccgtaggggcttcccctactgttaaagtttcaaaaaaaaaaaacaagatgaccgtttagtcctaagaatagaagtatgattgctagtctacttaatttaaacataacaaagcagatgttatacaccttaaaggttaagagcaatgtatattgctaaatcagcccttttattgcttaaagacagggtctaaaaaatggttccataatgcgtagactttataatgagacacgtgacatatgagtggcctgaatcaggagaaagagaatcccctaatatttttttattacttatgacatgttcatatgcataagggtatctggactactatatatatgaactactcttacataggtaaagcagatcataaataattatatagatcattttttttcatatattatggttgccctaaacaatgcaaaataaaatggttttgccaaatcggataactattcttttggtgataggagacgtacccgtcaataacgagacgtccgtagtgacttcgtcaatattaagatatatgtcggtatagtttttcggagatactcatagggatacgatgtacatatgtgtgttcataggattgagtgtgtacgtgttgtgagcattgcgtcgcgtttgtacaaatgtttataaaaaaatataggaaagggtctttatattttaattgactctctttccaatatctatgtcttgatgacaataagatcctgataaggatctgttgaacagaaactaagcttgactcgatgtctaccacgcgcagacttagccttaaacaacttttaacataaagtggtagccatgtatcaaatcaaatcacgccatttgtgtggcaaaactacctatatagcaaccaactgttctttttaatcattgagtaaattaatttactagtagtagacatctaaacactttgtcatattagcctcctaaaatggaactaaaatagcaatcctgataggatactaggatcacattcattagtcattgtgtcttcaattctactagcgcatatatgcaggtaatttgttgattatgtatttatgtatgcaagttttaaatttgaacactttataacttactgtgcatttaagagaggatatgcacataccgaagaagaaactgccaacagctaatactgacaaataatccgatccctttttttccccttaattttcacaggtctacatggtacagcttggaaggcttaagcccctgtgtggcgttgaagaatttgagcgtgcgcgcccacttgaggcggtccttgagcttgtgcacgacgacggtgtccgccacgagcgcgtggcggaagcagttcaccccctcccgcatcccgccgtcgaggtagtcgtacatccgcgtctcctcgccgtacctgttactccccttgccgccgcggcgcagccaccggccgaacacctcgtcctcgggccccttcacgtcgccccgcagcgcctccgtcgccgccacccacgccgccacgtcccacgacacgatgtaccccatgcccgacatgaactgcgacctcgggtcggcgtggcacggcgccgggaacccgtggtacaggtcgcgccgcggcttgtcgcggagcgtgtcggcgagcgacgccaggcggtagtacgagtcgtcgtcgatcttgccgacgtagtcgtacggcgcgtcggcgaacagcgccgggagggacgagaagtaggagtgcgtcttgccgtcgtccatgttctccgtgcagttgagcaccacgacgtcgccgtgggcgatgatctcgagcgacaccagcacggcgtcctcctccctggcgaggctgcacacgaagaaccggacgtcgacgacggcgcgcgcgggcgccggctggagcgcgtacgccaggcggagcagcgcgcgccgctcgtacatctcggcccgggtgaccacgccgaggagcacgcgcagatccaccgccggccccgtcgcgttcgccggcgtcgccgccacgctgttgctgcacctggcggcgagagatggcaggatactgaagtagccggggaagaagagggagtagacgaacgcgaggagcaagaacgggaggaggaacaaggagaaagaaagcctcttcatggccatcatattatcaagccaattacccgaatcaggggagaagaacggctaattagctggtgagatgcttagctaggctcatggctgaacggtgtacagtgtaaatgtaaaactgccttaagtaggcagtgtttgaaggctgcttcatggttgacaggtatgattccttggaagaatgttatttattgctgctgccaattaaatatagttatttattaatttctaaagataaagcccaacaagattatctctaagatatactgtatttttataaagtgcaattgcaaatttactactattttgaatcgttattacaagtctgctactagaaaattacaaaaatgccaataaaattatcgttcgagtggcatctttgtaaaatttttaaaaaatagtgacaaatttgtaaatgctcctttttataatccctctctttcgacatacttatcgctagacattatttatacttcaactatgattactcgtctttgaaaaaattacatattaatggattatacccgactataatatttgataacgtaggatacgattgacaccaagttatacacaatgatttttatatagttttaatcccaaatgtgagtaataactatgccacttaatggaagaggctgaggccacgaggccagaggtcatcgacacgagcagccatcggcccggacgataggctcttcttgtatttttttttcaaaacattgtattatgctttatcttgttgcacctttttgtatttgagtgtttcaccctcttttaatcaaatgctgtacttgcacatactctcttcatctatttttgatagtgatatttcatcttggtatacctaacgaggataaggataattaattctacttataatccatttaaacatgctattagttatttctcgtaaacaagcgattcattaatatttacatttctcgatgctcatgtagccaattatgtgtgaatgaatggagagtcacacattaaatctgaaaaagtcattaaaaggataggttgttggattgaaatatgcctatcaaaaataaattttttatatttggaaatatgccaatcaaaagtagatggagggagtaatatgtaatgcctccttgaaggtatgtgcacggtgtcttccaccgtcttgaaggcgattggcaatattgcttttaatattataattggtacttcttaaatgtcacatctagttgagaaaatttttaaaaacatcaaaaataattttttgacgagtaataaagcactactactccgtaaaaaaaaagagacaaaccctagctacgaacatgagcacacatatgtccaggttcgtactaggattggaatttttttttgacggaggggtacccggcatttaacattttggctaggataagacgtataaccgctagtcgcgtccaaacaaaatgcagaaaaatatactacgttcaatgtactgtatagagagaattataagaattctcttgtctgagaaaggccaaccaatatagttaaaaaattttagaggaatgggattagtgagctcacactttcagctttcagctttcagcaacatgagtagatgattactccctccataaaagaagtgttgtttttgaaagttaaagcagatcgagcaatcggcactaacatgcccttcattaatacaaagagaaaacgggaagaataatgaagtactaatggttggatatcttaaagtactatttataaatctaacagtgctctctctgtgattatatttttccatttaatgaaaattgcactacaagacaaaagtcctggcagtaattaaaataaaaaaaggataaaagtactctttataaaacggagagagtatatctgagcaaaaaatgtgctttcattggcatttactgaactcacacctccatcgtgcctctggttaggtcctaatcccaatccatccacgtatataggttgggattatgttttagtttttctagtttcactggtggagaaaccctttgtagtcccggttcgtaacccccctttagtcccggttttcaaaccgggagtaccaatccgggactaaagatcgctatctttagtcccgggtgaaataaccgggagtaaagatcgatctttagtcccggttggtaacaccaaccgggactaaagatcgagctgacctttttttttttgcatgcccctgttgctgcatggtttatatttatatatatatatatatatatatatatatatatatatatatatatatatatatatatatatatataaaccatgcatatatatgtttcaatacatatatatgcatacatatatatatgtatatatatatatatatattatattatattatatgtatatacatgcataatatatatgtatttatacatatatatgttatgcaaatgcatatgtatatagatatatatatgaacaaaatatatttacattatagaaaatgtgtacacatgcatatagaaacatatgtagtcatgtattaattacaatccattatatgtcctagctagctacgatttcgacgtagtagtactcgctgctagctcagaagctaaggaccggtgaattgtgtttccgtcgtagtagaattcacccttgggatcaaggatttcttcgttgatgaatcccatgagttgttcttgaaccgccgcgataaattccttgtgtgtggtcaggttatccctcatgagaataaactatatgaatgtatgaaattgattagtaattaaacaagaaatcgctacgtaatgaaattttgaatttatttgtacgtacatcgagctctcttgtggtgatgatttggtctgcaaggcagtggcaatactcgcacacgtaatagccgcacaagttagttccctgcttttgctttgcgcactacaaataaatgacaaacaacgagagatctaattaatatacacttgtatgtatttgaatcggagaaatataaatgtagagcatgtgtactcacaggaaatttaaacttccgcctaagtctttctctccatttgccgcggaccaaatgacggaaccgataccaagccctacatggagtttaaagctatgattcgtagtagcaattaacataacaagactttcttaattaacaaaggaacttatgacggtacctgtctataagttcgaaaaccttgtcaaacgtagactcttttttatccattgagtcatatacgttgacggtgcaggcctccaggtcgatgagtaaaagcacccagtggaatctgcaatgtgcgtgggatgcattacatatgaaacacttagcaagttcgtacgggaatgaaatttggtatgtaggaagacagtaaaattaaactaactctgtgttgtatggcaacagtatgaacgtcttgtaatgctgcgccttcaggagatgaacgagattgtcctctgtttcttgtggatattggtcgagcattgcgacgtttactttccgagggtcgatgaatccagtatcgaaaaccctccgccgtcgggccctttgaatctccattctacaacgataaaagggagtatattattttctatggtctacttatatacaaggacctaattaattaaaggagacgtatagtaagaaatctaactgaacgatatacttacaaaatccagcaactcataatagagacgtcgagggcgtccagctggtatagttcgtagattcccctgaaattgatccagagaatgtcatctccttgcaagaagtccgtgtccctgatcctcgctccgatcatctctctaccggtggcgctcatctccatgtacagctgatggaacttgtacatttgtgtgggtagggactgcagcagctcaggcttgacaagcggtttaccgagttcgtacatgtatttcacttccgccttttcgattggtgcgactcctagcaattgatccgtagttagaccggtgtcagtaataaattgttctatcgtcatttctttaccggtcaccaacggctcgatctcctggtttggttgctctccaagctgagggactggtttggactttccagaagatgctttcttcagcgttcgctcatagtccgatagcttgatggcctccttgacagatgcagacatacccctgaagaagttcctgacactggggtctataggaatcttcttttctggacttcgaggcttgaattgtctcttgacttctgatgcaacgtaagcgtcaagctcctcttgcgtgcaatcgtaccccgggtccttgttcttggcggcgtcaactttcaccttctttgttgcccttgtgtgggcaagcggtggagctgggggggcccttgactttgaaggtgccggaagaggagcttgcgggggagtaggtgtaggagcacgaggaggagtcggtgcaggatcctgaggaggagtcgatgctggagcctgcggtggagacggtgctggcggagcatgaggaggagacggtgcaggatcctgaggaggagatggcggagccggaggagatggtgcacgagacgccgcttgtcgcccagggaggatgatgtaccgcctgcgccatagaataatggcatggcatgtgtctcgtagatgcgtctcaccgtctcctgtagggtaatccagctcgaggtactcgtacgcgccttcgaccaactcaacttcgaccttggagtatcctgctggaatcggcctgcagtggtaagtacctaaagggtccgttgggatggctatgcccgacgccaccttcatgttgtgagagattatttattagtaatcaacatatataagcagcaactagcggaatggctaaatcttacctttattgataagttcttgaaaggaatatgcagctcacatggtgtccgctgagtgatgtcatcaacgggacaggtcgattcgtcctgtgtttgcatggcgtccatgctctgtgatcctacctgccccgttgaggcgcagctgctacggtttcctgacgggctcaccattgcaggaggaatggtcggctggggatcatgggaccgatgtgcggccatgcgttcatcaaccttccttgccacctcctcttgcatgttgagttcgtagctcgatacccggaactctaggtctgcaatcttcgcctcggtatctctcttgctcctcatccgactcctgtacgtgtggatgtcctccttaaaaccaatcttccaaggaatcacccctttccctcgagttcgtcctggatgctctggagtctgcagggcgagtgtcagctcgtccctatctctgtctggtcggaacgtgccctgagaggaggcttccactgcatctgttagtcgtcgcgcagcctcttgtatctgatagccgaagaccagtgagccatcagctgggtcgagcgttccaccgtgagcatagtaccagaacttcgatcgttccggccaattggctgttgccggttcgatacccctctcaatcaagctagcctccatctgctcccacttcggcatcgcgacgctatagcctcctgaccccaagtggtgatggtacttcttcttggcggcattttctttgtttctttccatcatcgcctgcccttgttcacctgtcttatatgcaacgaactcgtcccagtgatcccttagctttgggaatgtgtcgaagttcggtgtctgccccttcagtatatacttctggtacagatctcacttgaagctctgaaactgttctgccattttcttcagagtccaccttttcactttgtcctctgtacccgcaggaagggtgaatgtctcgagcattgtggtccacagcatctctttctccgaatctgggacaaagctctcatgatctccgcgtgcccttgttcttcgccagtacaccgtactgacaggcacgttatcccgcacaacccaaccgctgtgacgtacatagttcttggcggcttcggccggggcactaggacgtccatcttcttccacttccgttatgatgtgccgaccctcaagcttcttcgctgcacctcattgcccgcgtgccctcttctgtccaacggagggttgactaccactagcctcctcctcctggttcccctccacatccctttccacgtgcccctgctggttcccctccgcatccctctccacgttcccttcctcgttcaagtactggtttggatcctcgttcccctcttcttcattccagtactggctgcttccctccgcgattgtatcgtacaatatctgttcctcatcgcggtcagccatctgttgatacaagaaacatctgctaagtcacgagacatttatgttttaacaatctaagtcatgtatgctaagtgtaaatgtcgtacattagaaccctacacaaccttacgtgctaagtctaattacaaatcgtgatataagctaagtctaggtgacgtatattatacaaccctagctagtaaataattatatactaagtctaattacaaataaaataatcttatattaaaactcaaataatattacatgctaagactaaaatagtcatgtatatgctaagtgtttcgtgcgtatatgctaagtctaattaagactacaatagtcaattgctacttgtcgcaccaattccgtagtcaataattacataccaagtctaattacaaataaagtaatattatattaaaactcaaataatattacatgctaagactaaaatagtaatgtatgctaagtgtttcgtgcgtatatgctaagtctaattaagactacaatagtcaattgctaggagtcgcaccaattccgtagtcaataatgtcatactaagtctaatttgcaataaaataatcttatattaaaactcaaataatattagaacactacacaatcttatatgataagtctaattacaggtctaataatcttaattaattgcattacaaatataacaatcatttatattattacgtcacttgcctgctccaattccttctagggctagctcttccactcaggcttgacggatgactccgacaacacgtcttttctgcaagatacaaaaaaatgtattaggataaatgcgaagtaacatatatatatatatatacatatatatatatatatacatatatatatatatatatatatatatatatatatatatatatatacattgtgtatttgataccatggtgcccgggcaccatggtgccccatatgagtgtcctatatatatacatatatatatatatatattgcatttcacgttaacgatcgtcctcgttcgtttgctctttcacgttccctaactcgttcacgttcgttcgctcgttctcattcacgttcgttccctcgttctcgcttgtcttcgttcgatcgttctcgttctcgctctcgttcgttcgatcgttctcgttctcgttcacgttgtcgcggcaacgtacgttgacgtgttcgttctcgctctcgttcgttcgatcgttctcgttctcgttcgttaacggcggtgtggcggcatcggggcggcggttggcgcggcggcgtggcgacggcggcggcggcgtggcgttgtggggccgtggcggcggcggcgtggcgtggcggcggcggcgtggcgtggcgtggcggcggcggcgtggcgtggcggcggcggcgtggcgtggcggcagcggcgtggcgtggcggcggcagcattgcgcgcgcggcggcgtggcgacggcggcagcggcgtggcgttggcatgcggcggcggtgttgcgcggcgtcgaaggcggcggcgtggcgcgtcgtcgtcgtggcgcggcgtctcgtggtgggcggcgcgacggagagagatcgagatcggagagatcgagatgcatgaagggagatctggcggcggcggctctcaccccagagatgcggcggcagcggaggaggcggaggcggcggcgaggacgacgagctcgagacgacggcgagatacggcggcgtcggcgcggggatttgccctaggcagtggcggcgaaggagagaggccgagagagatcgatcggccgaaaacgtttaagtgttggtgaagaagacgagggcgcaccgggaatatatatacccctggatctttactcccggttgttctcaacaaccgggttctcaacaaccgggactaaagatatctttagtcccggttgttgagaacaaccgggagtaaagaaaagatatgtacttccggttgttctcaacaaccgggagtaaatatcttttcccgctatttcgaaattctttttaaacccggttagggttaagaaccgggactaaagattatagcactgcatatgattttcgcttacatatgtgtttataaaatagaagttaatgcattaacattatttaaagtacaaagattaatgacaattacttcgaaaaattatttttggctgtaataaattaggtggataaatcgtaataagcaaatataattaataaaaattccaataatcatatatacttagcatatatatgaatgatattattatattggtaaaaactctaattaagatatgtatgtacatactgcatgatttaaaattaataaaaattgtaatcatcatatgtacttagcgtaggaattatattaaattaaatgctaaaaactctaattaacatatgtaaatgccacatgcatgattttaaccttttaaaaattcgaatagtcatatataagtagcatatgaaagatagtaaattaaattgtgaaaaactctaatatatgaatgatagttttaaaaatatattaaatttaatacttttaaaaattctccagtcaattataattagcatatgaatgatagtaaattaaatgttaaaaactctaattaacatatgaaattgccacttgcgtgatttaaaacttttaaaaatcctctagtcaattataattagcatatgaatgctagtaaattaaatgttaaaaactctaattaacatacatatgaaattgccacctatgtgatttaaaacttttaaaaattgtaagtatcacatataactagcatatacatgatttaaacttgttgaaacctctaataatcgtgcgtaattaacatatgccatacatcagttgatttatatggataatcaatacatccaaaatagtttacatcatgtacacaataattacggcacgtactttctcctcactattgttccctccttgtgatcgctgcgtgagtaaggggtgtcttcatttgataggaggatgctagggtcaatcgtcaccgtgaaagggggttgcccatccaactgatcgtaatcctcgtcagtcttgtcctcaactccgacgatttttcttttgcctgggagaaccacttgacgcttagactcatcaggccctctgcccttctttcctttgctagacatgtccttcacgaaaaagacttgcgttacatcattggcaaggacaaaaggttcgtccgagtatccaaccttgttaaggtcaacagttgtcatcccactgtcatcaatcattacgcctccaccagtcaacctaacccattggcaccggaacagaggaaccttgagaggaccatagtcaagttcccatatgtcctcgatggcaccgtaatacatggcagttgttccatcgtgtcccatggcatcaacacgaacaacgctgttttggttcgtgctcttcatgtcttgagctctcgtatagaatgtgtacccattgatctcatatccctggaatgtcgcgatcgacccagacggtcccctcgccaggaaggcaagttgttggttgatcgactcgttacccatgagatgttgtcgtagccacgcggggaaagtatcaatgtgatgccgtgtaatccatgcatcggacttaccgatgttcctggcgcgaactagagccaagtgctcctcgatgtaaggagctaccaatgaagagtgttgcagaacagtgaaatgggctttacggaataaattattgtctaccgtcgttattgctttccttccgagagttccctttccccgtagtctcccttcatggcgtgattcaggtaccccgattgggcgaaggtcttcgataaattctacgcaaaattcgatgacctcctctgttccataacccttggcgatgcttgcctctggacgagcacggttacgaacatacttcttcagaacgcccatgtacctctcgaaaggaaacatgttgtgtaggtacataggcccgagaatacggatctctttcacaaggtgacaaagcagatgcgtcattatattgaaaaatgaaggtggaaatatcaactcaaaactgacgagacattgcaccacttcattctgaagggcttctaatctatccggatcgatgaccttctgcgaaattgcgttcatgaatgcacatatctttgttattgttgcccggacattgtctggaaggataccccttattacaactggtagcagttgtgtcatcaacacgtgacagtcatgagactttaggtttgtgaacttcttctccttcgtgcttattattcgcttgatattcgtggagtatccagacggtacctttatgctctccaagcattcaaacatactttccttctctgccttgctaagagtgtagctggctggactcaagtaatggcttcctttctcctttggttccgggtgaaggtcgccgcgttgttccatatgcttcagatcattacgtgcttccagtgtatctttcgactttccgtatacacctaggaagccaagaaggtttacgcaaaggttcttagtgaggtgcatcacgtcgattgcgtggcgtacgtccaagaattcccaatatggtaactcccaaaatatagagttctttttccacatcgccgcgtgaccatcttcgctctctatatgctggcttccaggcccctttccgaacactactttaagatctttaaccatagcaaacactgttttcccgctgcgatgtttaggctttgtacggtggtcggccttatgttcgaagtgcttgcctttcttccgtaccgggtggtttgctgcaaggaatcgacgatgacccatgtatacaaccttcctacagtgcttaagatacgtactttctgtttcatccatacagtgagtgcaagccttgtaccccttgttggactgtccggataggttgctaagtgcaggccaatcgttgatggttacgaacagcagcgctcgtaggttaaactcctactgtttgtcctcgtcccacacggggacaccttccttcttccacaactgtttaagatcttcgaccagtggtcttaggtacacgtcgatgtcgttaccaggttgcttggggccttgaataataatcggcatcattatgtacttcctcttcatgcatagccagggggggaggttgtagatacacatcgtaacgggccaagtgctatggccgctgctcatctctccaaaaggattcatgccatccgtactcaaaccaaaccgtatgtttcgtgcgtcctttccaaattctttaaattttctgtcgatgtttcgccactgcgaaccatcggcggggtgtctcagcatcccgtcctgttgacgctcttcagcgtgccatcgcaacattctagcattcctcttgttcctgaacaaacgccttagccgtggtattatagggaaataccacatcaccttagcaggaattctcttctttgttagctgcccgtcaacttctcctggatcgtcccgtctaatcttgtatcgtagtgctttgcaaacagggcatgcttctaggttctcatactcctcaccgcgatataggatacaatcgttcggacatgcgtgaatcttatgaacttccagtcctaacgggcagactatcttcttagcctcgtacgttgtctcgggcaatttgtttccccccggaagaatgttcttgacgagtttcaataaatcgccaaatgccttgtcactaaccccattttttgccttccattgcaacaactccagagtggtatccaactttttgtgcccctgctcgcaacctgggtacaacgaagttctgtggtcctccaacatcttgtccaatttataggcctccttttcactttcgcagtcctccctggcgtcctgcaacatctgaccaagatcatccgcaacgtcgttaccatcagcagctatttcctcctcgcccgtttgatttccttcaaatccaacatactgagcaaagtccggaatattgtcgtcttccacttcatcttcttccatttcaacaccttgctctccgtgggatgtccaacaattatagcttggcatgaaccccgactcaaacaagtggaaatgaatagtcctggatgcagaatactccttctgattcttacacttattgcatggacaacaaataaaacccctttgcctgttagcttcggccactctcaaaaaatagtgcacgccgtcaataaactctttggaccgccggtcagcgtacatccattgccgatccatctacatgagtcaaaaaaaccgcacacaaataattattcttacaataatgacagtcatataataattataagatatctttattcatacaaaaatcataaaatattacaccaaataattcttaaaaactatttgtaaagttttaaactaattttaatgtgttttacttcttttaattttcattttagtttgttttctattatttaagattaactttcactagagttttccttctcaactattttataaaaccttgtttagcaaatgaactaaatttctatatattctttcttccccacacacattttctctctcatcaacttacaactaaattttggagacaaaaaaagtgtgcaaaacataggtgcaaatgtagtatgacaaaaaaaacattggaggatgaagttgcaaaccttttaggcacctccgatttgtatgtaatcaccaaaataaattcaatagaaattttggcatgacctcccctcttttttgaagtaattttgaagcttgctcgggcagctggaggaggaagaagacatatatataggggtgggactttaatcccggttggtagcaccaaccggggctaaagatcaccgggatcattagtcccggttggtattaccaaccgggactaaagttaagatctttagtcccggttggtaacaccaaccggggctaaagatcaccgggatctttagtcccggttggtaatatcaaccgggactaaagttaagataccaaccgggactaaagatcccgggggggcctgacaggtcctgacaacattcgaaccgggactaaagatgatctttagtcccggttggtaacacaaaccgggactaaagatcaaatatacccgtttcccttttgaaccgggactaaagatcatctttagccccggtttttattgcatccgggactattgtggaaatcggccgaccgacaaaagatggtttctccaccggtgtttatctatctatacatatgctgaattcgagataaatccgaacaaatatactcgccatggtgattaaaatggttgacgtcatcaaattaaaatgcaccttcacttcatcgatcaagcgcatcgccgcccgtgcatcctcctctcagcagttgatgactccggctctccacgctaaactgattccgtgtttccaagaccatggcgaccactcggactctccgatatcatcctcactactagaaaaaaaaacatttttacagacgtggggtatttttttcgcaaacggatatgatcattggagccaaatggccacctacaaaaatacaaacccggttgaaactcgttgtgaccgcttaagcggcatgcctacaaaaataccctttattatttttgcaggcggaccgcttaagtggtccacctgcgaaaattgacatggatataaatagacaccacaacacatcaattttttctaagtatcacagctctcctcttcctcacctctcctgttctcctatccctcagatccctcaacgacagacgacgggggcggcggaaaccggcgacggcgaggcgccgggtcagcggcggcgaggtgcgaggtcggtggcggcaacggcgaggcggcggggttgacggcggcaacagtgaggcggcggggtcggcggcggaggtgggtagggacatgggtgggggtggcggtggtttttttttttcgtcgagatgattttaacaagcgggtgactgggccgcctgcgaaaatcatcattggcatgcaggcggatcgttcctccacctgaaaagtttatttttggccgcctgaaaaaccatttttatagtagtgcctccgcgtcactgatctgactgccaattcaggctcgattgattcagctcagattttgtatgtttctttgagtcgaccacacatttgtgccttttagtttgaaagattttaacaaatataacttcagaacaaaacactaaagaaaggttagaataagtaataagataatataacacatgctataaacttgttatatttaattcatgctgacttggaggagagaaaagggaagtgagttgtatattttgtagcaactgcatataggctatgacaaactttatgagagaaagatatgagccatagagtcattaatggtctaatatgtgagaaattttacggtacttaaaaaatatcttgaggtaactaaattttacattaaaaaaattgatacctcaagacacttcagtacctgaaggtatcaaattttatattagaaaatgtgatatcttccgatattttatcaagactaataaaattaccctaaatatgtatacgagactttcttcatctctatgtatatacagcaaattattgtattaggctaataaatttagctgtaaatgatgtggcaatagttataggcagttgctaccattgaacttgctcttggagagctgaacaagttagtaattaaatctgtgaaaattcgttgcctaacaaaaagaaatgaatttgaaagaatcacaagtcttagtggtccacatggaacagcggggaagccttgtggccctcggtggcgttgaagaagttgagcgttcgcgcccatttcaggttgtccttgagcttgtggacggcgaccgtgtccgcctggagcaggtggcggaagcacgtcggcccgtgccgcatcccgccgtcgaggtagtcgtacatccgcggctccgcgccgaacacgttcctccccctgccaccccaccgcagccaacggccgaacagcttgtcctccggccccttcaggtcgttctggagctccggcgtcgccgccacccacgccgccacgtcccacgacacgacgtaccccatgccggacatgtactgcgtcctcgggtcggcgtggcacggcgtcaggaacccgtagtacgcgtcgcgccgcggcttgtcccggagcgcgtcggcgagcgcgcccaggcggtagtaggtgtcgtcgtccgtcttgccgacgtagtcgtagggctcgccggcgaacagccgcgggacggccgagaagtaggtgtacgtcttgccgttgtccatgttctccgtgcagtcgagcacgatgatgtcgccgtacgcggcgatctccagccccaccagcgccgcgtcctcctcggcggtgaggttgcacacgacgaaccggacgtggaccacggcgcgggcgggcgccggctggagcgcgtaggcgaggcggaccagcgcgcgccgctcgtacttgtcggcgcgggtgagcacgccgaggagcacgcggatgtccggggccgccttcgccaccgcgtcggccgccgtcgccggcgcgctgtcgccgcacgccgcgagcgaggattggagcctgaattcgttggggaagataacgaagtagatgatggcgaggagaaggaaaggtaggaaaaacagtagagaaaacgacttcttcatggccatcataatcgcccaatcaatcctgcaaattacggctaattaccttgcgatgctaagctcttcactgcacttaaaatggcttaatataagaaggcagtgttcgaaggtctagttcaaggtcagccatgccctgcgaacatgcaccaatagatgccaagcaatcgagtccattttcttatatccaagagggtaccaaagttgtagacataccttgatgtacacacaaatgtgagaaaaagaggcattacaaatttccatgggcagtatgatttttctgtttttagcaaggaaattatagaaatgcatgcatatcgagattaacaatgaccaacatgcatatgcaggtaggctgtatcctctgactcctccgaaggaaatgtctcgttggtcaactgttttgatcgtacgcatactttctgggggagctttagggaagtccatgcaaaacattgcgtagatcggaagagacgaggaactgaggacggacaagcccgctgatttttctgaatgtagcttcagtttttaaccttttatttacttgtgggcaactggttgaattagattctactagatgctattgaattgtgttgctctcttgctgttaagttacggagcaagctagctaatccttcaattgttttggagggcttttggttatacatatcgactttctacaatgccagaattatgccttttatctattatcaaggaaagttcctatggatgacctggagtgttttactccctgtcaaccaaaaaaaaatctcggcggtttggaattttttttttttggacagaagatatagttgcactctacggtatcgatcatggccttgtctgaaataaaccttttttcttatagattatgatcatgtcgatagtttttagcttgtcacatcgtggttcgttgtacgattgattagcttcttccatgagaaaaaaaaggaatgaggatatgggagaactttgtagcttaaggtccttgatacgtgcggcacatttctgaaatttgcagtgatttctccactgatcaatatcaccggcctaggacaaaatttggtgggccaataattagtccgttctaaactaagtacaagtttgaaattggagttcatgtaaacataaagtagactgattgtacaagcaatctgcaatgatgcactcaaagtcacaagtcccatcttctcgtagaattttgtggcccatgtagtgctaagtttgaaggaaatcctaacccgtgttagtcatctaaagggcccataaggccatgctaccaactgcccaaattcggaccatgaaggcttaccaagttcagaacacgtgaggcgagcattttttgacggcgatacggcgttgacattgacaatcctccgtctttcttgatccaagacactgatcggactatcatcggatggagtgagctgagggaccatgtcaaatactttttgtaagggcaagggcaataatagagtaaacatcttactattactattagtatcctccacatcatctatagatggtttaacagacgatatttacaataagatagtacatgctgtctctaagccgtctctagcaaagcaagctgcatttaattctctaattgtatctttcaagttacgtaggatcaactgtaaacatcacttgagtagccacttatatgtcaaccatagacggaagactatgttcaatcaataaaaaaataaatcatatgatttatcacaaagcagacggatttatcaacaacaatggtgtaatattcataattcattcgaactaattcattcgaactaaacagtacaatagtgattcagattgttacttgatcgaaagaatgttcacagattgacaaataactaattcatagaccgacaaaataacttagtctgttgcaatgatccatacatcaacattcgacaaaagaaattaggccattacaacgatccatactgccaatagatggtaacaacacaagtgttcttacatgacaccagcgaattactaaaaattactttataactagattatctttctcaagcagaaccaaaacaagctgccagcctaccaaattgagcatcttcactacctgtcattaaagcaacattatttccatagaaaataggaggctgatgattatagaacaattgtagcatataatctggatggcaaaacaactagaaggaagtagtactactattttaagtagaaacaaaaggactattaaaggacttatttgattatgttgttctttggactgtacagtgcaagtagacatgtacatacctcccaaaaccatagcagaaagcaccaaaaagctagcaccaaagttttccattgtccctgaaataaataaataaaaatgataaatgaattaagatgcttgcaattgtaattgaaaatgtgaaaacaagatgcttaatgtcctaccacaactaagtacgatgggtattgctaaacttttgccaaatatgttcaaccagatctttttttagttgggaatgtggtgcacgagcacgtattgcagctttcctacgcagcacctgatcaaagcatggattgtgcccagtagttacttcaggaggaagagcaaccgatgctccagggtccacattcagatcaataggaattttaaccccccctctcattttcaactatcatattatggagaataatacaagctttcatgattctcccaacactcttccgtttccacgaccgtgctgggcggcgcacaatattgaaacgggactgcaggaccccaaatgcacactccacgtctttttttgccccttcttgatactgtgcatatagcttgttattctctgtttgtggagcagctattgacttcacaaaggtagcccattctagatatattccatcagcaaggtagtatcctatgttatactcattaccattgacaaaaaactttactctaggagcttcccctttcagcacatcaagaaatagtagggattggttcagcacattgatgtcattatttgaccccgcgacaccgaagaaagcatgccatatgcggaggtcacgagtagcaaccgcttcgaggataattgttggcactccatagtcaccgcgggtaaactgccctctccatgttgttgggcatttttcccacctccaatgcatgcaatcaatactgcctagcatcccaggaaagcccctagactcattaacttgaagcatacgctccacatcctcatatgtgggacgtcgcaaatactctgaaccaaatacctcaatcacccctcgtgcgaacatatccaagcactgcaaggacgtgctcttgccaatcttaaggtactcatctaggctatcagcagggctgccatacgctagcatgcgcattgcagctgtgcacttctgtaaaggtgagagcccttggcgaccactgcaatctacctttagtgtaaagtaaggagacaccttccaagggcactcactatgcgaagaaaaatgggtcttcccatacgaaatcttgtacagaacatgctctcaaggtaaagagggtcttcactgaagtagtcagctatgagacgatgatgtgctgctgtgtgatccctcttgattgtcttccttgtcgcactcttccttctgatttttccaattctaagcttggtcttgatcttttccatgacccttcttgcaaaagaatctatgaggttctgctcaacaatgtattggtctataattttggaaggatctaattcaccagaatcatctggagacatggtggagacaaggggtgcaaggaatgggaaagaagtgttgaaaggaatgacagagggatggatagttagcaccattagaccaatatatatatatatatatatatatactgttgggaatgcatactagctagtagcatgtttatttgaattacccttaattagattattgggaatgcatacacagagcatgttcatttggattactattaactagactattgagaattcaagactgcatgtttatctgcacattgttgatttgactgcatgttaattttgcaactgctgacttgactacatgtttttctggaaataatagctacatgctgactatattacaagttagattacatcaatatttgcaactctttgaattgtgcaagaaacatatatatgtttgcaggaagttcaattgcagcaagtaaaaaaaatacaacaagctttaattagagactggaaagtgaagataccttagtattacggaaacaacttctccctcatacacttcaatgccatcaaatgctcggatctaacatcatcaggcatatcttttgtattttgtaacatgagagactgatatgtttccaacataacagcctccttgtgctccatggctgcaaggtgcgctaacttttttgattcaaggttatcactagcaacacgcctctgagtctctagtagttcatcacgacctttatttgccatctcctgaacttctttaagcttgtcaatttcatcatcagtatctgatagataaacctttgccttccttttgcgtttgcctttaccattacgttgcgccttagcagtttttgttcctattggacgtttaatatcttcaggactgttaggagtggacatttgctccatcacttccacttcatcatccatctttggtttgtttggcttctcaagttcctccaagtaagcatgccactttggttggtcacgaagaatgttccaacaatgcagaaatgaaaatgggccttccttgtaatctgcttgatatgttgcttcagccttttccctgagttgcatatcattttgtccactaacatatatggatttaacctctttataaacacaacagaaacgaccaacatttttcttaattttatgaaaacggtctttgatttgtttttcttgccttgtcctgtttttgggagtggtgctattatactcagcagtaacatctccccaataacgatcatttttcttaaaattaccactgatcgaatcattcgagttgtttagccaagcactcacctataatcaaaacaaaacatgattagtcctatactagaaataaagtaacagtcaatgagaaaacacgattcattgcctacatccttatttacttactagtcttatgtcctcctctgttgaccatgtcaaccgcttctcagtcctaacagtgggggcttcttcatcaccactatcaatgttgacaggttgttgtgctcctgtacgtaattttgaacatggtgctacttgttcagcaggataataatttggaggcacaaaaggtcgatgattctgtaaaattgattgatcctaaaagtaacttaagaaaccaccaggcggatgaaagtccataccactgcaagaaaaagacaaagatccaaaattattgccatataacatccttagcacttttttctcttcatctgtaaatgagtacattaaaatttgacaaagcacagcctatgatactaataattctcatgccatataaagttactatttttgtgtttgtagataagttgatttgtctgttcactacctatgtagtaagagttcttgattattcaaagtgtatgtgtagattagtacaaaaagtttggccatgcactgacctatgtacactagtttttgctataaaataaatctatatgtatctgtagcccttgcttactatcaagttattctcttgccacaatttttttccctttctgaatatagcaagacttaactttagtatgagaaacagatgtacacgttgattcttttgacatattagcaggggatatgctaatctgctagcagcagatcagatcgtaaggggaaaactagaatacggcaagaatcaaacttagctagtcaacaccattaattttctaatcaacatggaggtacacggaacttccggagcacatcaatccaaaaccattcaatatcaaaagtacataccgttcttgcagatctgacaattcaatggcactatgatccaatccttgcttcatttgggccatgggaaaagcagaagcagcggcgtcgtacgcgtagagcaaagggagcggcggctgcggtggcgccgaaccttgccaggcaccactgcctaaggatcccggcaacatcatgccagatgcgaaggatcccggcgaggcttgcgacggagatggcggcggcggtggcgcaacctctcgtttcgagcgacccattgtttcagcagattgagttgagggattactaactggatggggtatttcagtaggaatttgacgcttcgactaactaatttggcgtgtaaagtgcgatttttttcccgcggatggggatttaccgccaaatatacagagaagggatgagccatggagcatgggatgcaaaaggccaagaaagcatgttctttgtcgacggcatcggctcctgcatcgtctccacgcctactccatccatcttgttgctcatgccgagctgtcgattaaacaagcacccgctttcttctctctcttcctttctctgtccttctccagctcagattgtgatgacctggacgggctaatagtaggttgattaatcctcattgtacttgcccaaacacttaatcgaatcggctatactgttactcaagatttcgcgcgcccctataaaaaagtcgatataaaagagaaaaaaaacttgcgaaagtttactagcaatttcaaagaaggggtgctagatgaatctctcttccatttgtatgaccattctctacatttttcatgcaagaagtgcaagcatgtatgcagccatgcttgcaaaaactaaactataaaaaactagctaattacgcttttaagcgatttggtataataattggttgtagcttgttgaataaagtctggaaatatattccattatctaaaaaaactagctaattaaattaatcaccgtgaaaaagcagctaaagatcttagatcctaggtgtgagatctacatggtacatcttggaaggcttgagcccatcggtggcgttgaagaagcggagcgtgcgcgcccacttgaggcggtccttgagcttgtgcacggccaccgtgtcggcgatgagctcgtggcggaagcagttgacgtcggcgccgtacatctccctgtccaggtagtcgtacatccgcggctcctcgccgaacctgttcttccccttgcctgccccgcgcaaccaccggccgaacacgtcgtcctcgtacccgatctcccggccccgcagctccggcgacgccgcgatccactccgccacgtcccacgacacgatgtaccccatcccggacatgtactgccacgccgggtcgatgtggcacgggttcaggaacccgtggtacatgtcgcggcgcggcttgcggcgcagcgtgtcggcgagcgcgcccaggcggtagtacgtgtcgtcgtcgatcttgccggcgaagtcgtagcgcggctcggcgccggcggggaacaggcgcgggagggccgagaagtagtcgtacgtcttgccgtcgttcatgttctcggtgcagttgagcacgaggatgtcgccgtgggtgatgatctccatcgccaccagcacggcgtcctcctccttgtccaggctgcacatcacgaagcggacgtcgatggcggcgcgccgcggcggcggctggagcgcgtacgccatgcggagcagcgcgcgccgctcgtagaagtcggggcgggtgaggatgccgaagaacatgcggaagtcgacgtcgtcgtccgccgccgccgccgccgcgacgctcttgctggcggcgtcgcatggggcaagcgccgacttgagctggctcaagtcgttggggaagatgaccaggtagaagagcgcgaggacggcgacggggacgaggcaggcagagaagttcgccgccattgttgctagcttaattagtgaggtgcactttgcgctagcttaacgctaagtacgttgcttcgtgcttttgtcagtccttaagtagactgccgatgctcccacactcgatctggcatctggctgatttaatttgtcgctagtgcatcgttaacttgccaagttgttgccaaaatttagatgaacaactgccacttgtttaattatgtgagtaaactaattaatcgaacgtttactttagaactgttattatatatatgctcgatcagtcgatcgatcccggtgaagacacttgtaacttttgctacgattttaaaacttcttggtccggaaagctccaaggccgcgtgcactcatatatggaagtgatcttgcttaattttacattcacaattcgagtctacgtactgatgatctacgggtcgttaactacttttaattgccagcattaactcccctgcctcgaagatagcgtagatcggaaatgatttagatctaagctctgtaaaatatactgcgatcaatcaataattgaccagaatcggccgacctattgggcaatcctggtcttgatttggtattttatatactaaactcttaagactgttagtcttttatagatggcactggcaaagtggatgaacgtgcagaaatatgaagtgaaggaacagggcgatcctgagttttcaggccccggtgcaaaactaaatgtaggggtccttaacatactactacaaaataataatcaactagatgtgaagttattgatgacatggcttgataattaaaagaattaacactattatgatagtttaactcatataagttacactacaaaattacaaatataaatttaaaattttaccaattagttgatcgcaagcgtctaaatgcgatgcttagggcatgaggacgattcgatcgagtgaacggaaacaaacaattaagcgctaatgcccgtgacgccgtgcgtcgggatggcctacatatgtttatgttttgatatcgagagattggacagcagtaattaaattaataattgggctacggagatggtgtattggtgtgctgattgctaaccttgccgagggaaggcaggcgatggaggctaggagatgccgagtagcagcgacgcagtagattgcgtcgtcactgagcagctggcagcagcaaccagggagattgcgtcagtgccgagcagctgtgattgccatggagtgaattacgtcggcgccggccgctggcgacacgcgatgcagtttcgatttttggcttttcgccaaatcgctatcgcccggtcaccgatcgctaagcgcgtgcgcgtgaagaggacaagaggggatgtgggcggcggcaatcacgcgcgtttctgttttcttttcgccgcggggcgcttcgctttccggcttccgcacatgcatgcgctcgatctgcgggccagggacgcgggagggaggtgtgtgggggcccctgcgatctgggggcccagatcggtggcagtggcaccgctcccccccccccccccgcgcaagggccggccctgtgaaggaagcccaggttttgcgtgttgccacttggggtctttttggcgagtttttgtcagctgcaccttttttttttctactagaagcttttcaaacaatctagattttttacctagatttttagaatatgtagttatagaatatagaaaacagattagaagccaaaagctggttttcatagcttctgtatgttattatcagttagcttctcactagctgcttattaaaatcttaatctctccaaacatgccattgatttgtttgaaaacctctacgtaattaagagcataattgaacttatacacgatatataactgtatgttataattctcttaggctagtcacttctttcatgtgctatagctgattataaatctacgactaattacactctcttcctttctcacactctctgtgtgggaactgtgctgacatggatcctctatagctatcaagctatccttatcgtacagaggataatccggcaagttcgacaagagttaaaagaacgaagacaagactattattgaaaatttatgtacactttttttttcagaatttttggtgacatttgttagttatcgtgtatgatatgtgcagtgcatacattcccctcgggccactctcagcccaaaagaacaattcaatttggaataagtccattttgccttcctcatctcttgcgcttgcgtgaataacatccctcaaccagaaaaccgggtataacgcctccttcttctctgaaaaccagagcaaatcaactccttcggcggtttcggaggcggttttgtcctacgtggcacttacatggcgggttgacttccataaggcatcgacgtggcgcttacgtggcactaaaataaaaataaatgtaaatgggacccacatgttagtgagtaaaacaataaaaataaaatattgggcccacgcgtcagttacatttccccttcctctttatcctcacggcaagcgagatggagagagctagctcggcgggtgcttggtggagtggtggagcggcggggcagcgggagctcggcgggggcggcaggagcgacggggcggtgggagctcggcggagcggcgggactttggcggagtggcgaggcggcatgagctcggtgggagcgacggggcggcggaaggtcggcggaatggcggggcggcgggagctcgacggagtggcgaggcggcgggagcggcaggagtgacgggcggcgaaaccgcgggggcggcgggagctcactgcctcccctcccacgcccctcctccgccacctcatccctatcctcgcctcctcggcctcgccgccacctcttcttctccctccccagcatcctggcgaagatggacgccgacagacatgcaaagttggcatgggaggatgcaacacaggggttgtcgaccacgcgtcgctggtctgacgcggacggagccagaacgccgccaccacgaccttcccacgctccgacgtcctccatccaacattcggcgctcttctcgctgtgccgacagcgaccggcagtgtcgccatccaatcttgcgttgggcaacaggcaacaattggccgatgacgtgcgatcatcgcaggcacgtcctcttcatgtcacggtgatccttgccgccgtagtagccgtaagcagcaccaccctagccgtaaggtgcgccgtcgtagtacatgtaaggatcggctccgaatggcacgccgacgccgaagaaggggtcgacgtagcctggcgccaggccgaacgggaagccgtagctgccgtggtgatcgccgtcgacggcgagggctccatattctgcggattggtcgcccgccactgtctcccgcgcctttcttggttcgaggacacctgatgagattgtggcgctcttcttagaagacacgttgctgtggctcgcctgcgaagcggccgggctctgcggcgccacctctgccgcgttgctgccgacggagctcctcggcttctcagttccacttgaagcgctcgctgcgccgccggtgatggcgagaacgttggcgatagtggtgcggagcgtcgggttggggatcaggtcgttggcgcgcgcctgggccccgcacgcgcacttggacttggcggcgatgtggtcctagatgcacctgtcgcagaagctgttgaagcagcacttgctcgccagcaccgcgtcggccatcacgttcctacaaatcttgcagtagagttccgacgggatgacgccgctagatcccccgggcggcgtcctccattcggcgctcgtctccagctgccacaggggatggaaaagataacagaaagaggagagtcgctgacaagtgagacccacaagctgattcagctgccacgtaggacaaaaacgcctccgaaaccactgagggagatgatttgctttggttttcagagaagaaggaggcgttatacccggttttccggttgagggatgttattcacacatgtgcaagagataagggaggtaaaatggacttattccattcaatttcaggttatttggatgggctttccaacaaattggcccactatgaaacgggaatgaggcctacgacgcaccaaaacacacgatcctctcggataaatcacagccgtagaaaaatctgcaccggaagatcgccgccgttcatttctgctactgacgggtacataagagctaccagcgccgctggctagggtttcttcttcccctcgtggccgcgcctccgaaacccccacctccgcgagctcccagtctctctccggcggcagaagcggcggcgacgacgagatggtgaagggacgcaccgggcagcgcgtgcggctctacgtccgcggcaccatcctcggatacaagaggtgaggggcgagctcgccgtctccggcaaccgagggttgtgtgcgtgtgtatgtgttccattctgtcgccgcgattttgattggtggaatttgggcaggtcgaagtcgaaccagtacgagaacacgtcgctggtgcagatcgagggggtgaacaccaaggaggaggtggcgtggtactgcgggaagaggatggcgtacgtgtacaaggccaagaccaagagcggcggcacgaactaccgctgcatctggggcaaggtcacccgcccccatggcaactccggcgtcgtccgcgccaagttcaagtccaacctgccccccgcttccatggtgcgttgctcccattctatgcgattcttgttcttgtttatgagcttgtgctgatttttctgctatgtttgcatcgttgcaggggcgcaaggtcagagtcttcatgtacccgagcagcatctaaaggttagtgcggattgtatcctgttcagttagctgtttgcgggttatagattaggcttgtttctccaagcatcagttgaagaatgaccattaaacagtcgctccatttgtgcaattagccatgattgatgaacgactctgctgttatgatgatcgctcaattctttatcgaacatatcatgtatggattgttattatatcttgagttgcttgttaagaccatggtaggatgcttagtgagtgttactttgcatgcttgaacatgttatcgcacgggcgatggagaaatgcagtagatttttccatcaagccttctgtgctagggtgataatgtaatactattacaattgaacattgtacgcacgaaattctgttttcgcagcatgtcaaatgtggttgtacgcctgatccctgagtccctgactgaggaatagccattttgtttttggacatcctttaaaacttcttgcatttggcaattgtgtgcgaagattaactgggcttgtgaattgacatttgcaatcaaacctgctcaattcacttcattattttcatattgtcataaaccatgcttccactacttttgagggttcagaggggcatgtaaatggtctgtgccatgatgctttcctggtttctttgaaatccattccaatatgaatagcttgaaagctgaatattttgatctaacagtaagtccataacataggagttacctggaagaggctttattatgtcagtggaacttgttatggctattgaactgcagatactaaattggcattatattgggtccttgtagtgtaatcgttatgtacacaaatgattgacatctgaggaatttttatcacatttacttacaatgtaaaaaagtttcccagccatgtttgtcacaaggttgcatgctaaatttatcttaatgcaatcgcgtcttcatatcctatttagtataaagaaccgagtatttgatttaccaacagagtgtctttttgttaaactatcagtttggcatcctactgaaacattctagtactgtttgttgtttctctaattgtaatttttgtgcatatattgtgaagcataaatggctgtgcaatttccaaattgctgctgtcttttgtttgataaattaataacagtttctcatccaatgcagactcttgaagtgtggaggatgttgcttatctctcttagattttacttctggctgaaaatgtcttgaaaggagccgtattcatgttgagtttgcaagttgaactgctgttccctgagaacccctggaagttctccgtagttttgatgtcgaatgtatgcaccacttctattatattatgtcatatggacttatgatggagtcagggttggaacttgtaagcttgatttgtcatgtttcacagcatctatcttcttcgtatcatttgctcgcatttctgagtcacaaccactgttattccctcagttttcttagttgcagtttgctttcttcgaagtggaaagctgaatcagatttgacaagctagaactcacgtactcccgcaaaatatagcaatctctgcgattcaaatttgccctaagtatagctacctataggattgtaaaaggtgatttttgcacctacatttcccatcttatttccagtaatctatatcacgcgaactattaagccctattaaccctactataatagaggttattttatataggaggtcattcagacgtgctatggactgtcgtcagtgagccgttcagacaatcagtgcaacgcttccctttcgttgcaaagctctcaaatgggccttgcacttctcgccgtttggtggtgaggcccatagagtggcccaatccagcgagacgggcctttttgagtgatgggccacgtgtaccggggcctaaattgggaagctcttcttccctatgcgtcacacgccgccgctgccgccgtctgctcctcattcccgcctgcccgctcaaaaaagttctcccccaaatcccgacctccctgattgacaccgagcatggcggaagagcagatggaggaggcgtcgacggcgggggcggcggccacgccgttccagctccagttcgacaagcccatccccttccaggtatcgtctctggttcctcctctgaatcgctcgtcgtctgacctgccaaataccgagttcgttttgttgcttgtccaatcgagccggtctgtgtcgagaagctactgattaatgcgcttacgagttgatcctagcagagcatgcttgcttgcttacttcgtggtagagcacgggtgggcggggcgggtccaggggttgcagccccctttacctgcgtgccaaccgtttgttgaaattcctagcagggttagatcggttcatagtaccatcagtgcgtgtgattgagagcgttgtaactggttttgggtgggcgatatgttcagctaatctctcacattgtttttttgagagaaaccgagagatttatattaccaaaccatctgaatcgctggataccagccgttccagaccaggcgggcagcctgcccaggaagacacggtctggagattacaaccatacgcggctagctcatgcgctaccttattacaactcctgggcgagtagctaacagagaaggaatgaaaacagctcaaaattacatgtttaatctcaagaatcactccacctagagatgataggttaaaggaattatcctggatcgcattccgaagcatcattgagtctgtttctagctcaattctggacatacccctttcgcttgcagccttgattgcagcagcacaggcgataacttcagcatggaaggcgtcttgtagatgagctgccggaccagctcctgcctgaaggattgagccagcccgatccctgatcacaaagccccatcctccctgctttgtgttacctctgtacgttccgtcagtattgattttcacaaagttcagaggtggccatctccaaactgcacactctcctgttctgggatttttgtcctttgcgttcatcctgacgaattctccagctcgtgacatgatcgggtgtgagagcttagctgggcttcttggtgttcctccttctcttacttcattcctctctttccaccactgccaaaggcaaactatggcacttgttcgttcattttccgggcggcagcaaattgattgtaacacattctttcctgaggtttgctactctagcctggttctcaactcttctagatttaaagcttgccataccttcttcactggcttgcacttgaacaaaagatgtcccgcatcttcattatactggccacacatcacacatctggtatcgacatccatccctcggtgatgcaggttggctcgcaacgccaacgtgttgtggcacattctccacaagaagtgtttgatctttcccggaacacccagtttccaaagcttcttccaaaaatcatcatccccactctccccatttgagaccccagggcatccgtttctgctagctcttctctccatctccctttgcaccttgtaagctgatttgaccgagaaacatcctctcgcatcaaagtgccacgccaaaacatcctccatttcaacatgcacaggaatggatttgatagctgcgacatcctcttcccagaaagtttgtgacagcatattatcatcccaagttccagtataagggtcaatcagttcctccacttttgtcacgagattagcgcctctgggtgttataggtttccttgaccagcccctcggtatccaaggatccgcccagatgttaatcttcgatccatttcccaccctccatatcatcccattttgcaaaactgtgagacccttttgtatgcttctccaagtataggatacatttgacatctgctttgaatggaaacagtccattttatgttttctgtactgatagggagctataaacagttaaacaccagcttgtcgattagctcttgttgatgagtttggtttcaggttttgcatttcacacctctgtcgtcatacttgatcggttgatctggcaatttctatttttatcttatcaatgcatggctttgttaacataacaccagctttgctgtctcggtttcaaaaaaagagtagtgacacacaagaaatggtgattagtgaattcaaaattaacctgtcatatttcatattcctgctgaatttcattttccatttattccatgtgtatttctgttttcagatttagtgtaagtggaatctgtattccctttgatattttgttgtcatttcttaattcatgctgtcataatccgttagtcactatttgcagataaaaatggcagagtggaatccagagaaggatctacttgctatggttactgatgactctaaggttgtccttcatcgattcaattggcaaaggctatggactatctccccaggtagccacttgctattgccccacccttgcagctacttttgtttgttacattttttttttggctgacagcattttctggacatactgcttctgacgaaacagaactagatataagcacatattttatgaactatctaactgcacccatcatgcttatattttcaatacaatcatgttggcgctatactaaaatcttgcttatttttcagggaagtgcatcacatctatttgttggagccccgatggtaaaatagtagcacttggtaccgaagatggtttggttcttttgcatgatgttgaggtgtgtatattaatgaaatggatgttcaaatcttgttgatccctttttgttttgtgttggatttggacatttactcatatatcatacaaacctgatcccctgcttattttctcttgatcttgatcttcaccctcaccagcttttatgagcagattggttgaactgtgtagggaccattgtgagaaatagttccaaggagctattggtactttggtagagatttataaatgacactcgaactagacacaaagaacatttccaattacttcctttcctgttgagcaccattttttaatacattcaacctatagcaattcctttgtaattgaatggtcattatcaaatgttttgtttgtagaaccaattttatgttgtgattctgtccacttgttacttttatttcactttacctcattgtgcatgtttaagtgaaggtgctgattgcagaatgggaaaatgctaagaagaataaaatcccatgatgttgccattgtatgtttgaactgggcagaagatgagcttctatcaagggtataccattgccttttccatcttttggaaacaccaactatttctctatatataatgtaatgatgtataaataaaaatgtgtctcatcatactattatagttatagagtacatcattcaatttaaagcattattcagcaatacataaagcgacaaatgatgaattcattcacttttacaatactcttagtctagggtttcactgtaaaagttcactatcacaattctttgctaatgaccgcagaccgacaaggatggcctgttatcctatgaagaccgcactgcacgcttctttcctcccgctcctgtgattcctaggatcggtgggctgagttctggagacactggtctttcagatgagaatgaagaatccattcaggaattttcaagcgcttcctgccagcgttttaatattctgtgcagtggtgataaaggtggttgcatttgcttcagtatctttggaatattcccagttggaaagatagtaagtagatacaacacctgagtgctcctctaatttgaattcaatagaatgttaacaggtactcttcattttgattctgaaggctatcgcttagttagtgtcatagtgaaaatttccaaccctaactgcaaacgtgatattatggaacagttcatttttataaaaggatttgcttagctgcagagttcttagaaatatatcgttttggaagaatgactaaaagatactgtggcaacattatttttgatattgttggaaaattgcatcatgctgttttctcgaacagggaggccaacttccctggataccggcaatttttcataattgaagtatagacgtgttttcaaacttaaactcactgggcaaaagtgctgggagtgttctattttttttcctactgggattatgataaagcatgcttgtttttatttttctttttttaatgcgcacacaagcaggtggagtgtgtttcaacttttctttcatttctctttgttccatgtagttttaaggatcgagtctgtggacattgatcaactgatgcctattacctaattctttttgtttgtaagccatgacgccttagttcatttatctagttcagtgtctcatggataactaattttatgtctatggcatttcagaacattaatgaggttcctatccatttccaatcctctggaaacaaaactagttaccggcttcaggatgcttccataagcaaggtaatgaattttttgtttcataaatcataagcacatattaagtatgaaattctgacaatggcgttcacatcaggtctgtttatcaggaaacctccatcagttagttctcctgtgccctggaaagctgattgatattgacaacctttctcatagtaatcacatttctactgggttacattgtctgcatttggacacttctatctttttcaacaggtaatgtcatgatagtttgattgcctgtgactactttctgttgttgttaagaaaccattatcttgttgcatggtgttttatggtaacttcaaaacatgatggagatttccacatgaagtgctagagcaacacactcattgacacctgaaatgactaattttgataagctcacctagtcatagaaccatcattctgttttatagctaggtgcaaacatctttcttgtttgattcctcaaaaacatagcacctgtgtttatttactaggtttgcaaggatattaatatcactttagtgctttacctactaaatttttttaatctgtttgtgtatcatcaatgctgtgaaggaaaaatgagctacatcagatctcccaacaagcatcaagtattcaagatctggttgaagttgtccgttcttccctatccatgatggccaaacaatggtcaagtgccatgaacttatttaatgaaaaattcagcgccttgccttctctgatagctgcccatggtatgatcgattttcaagtcataaccatcacctcaagaagtctgccccctttattctgtctctgttggtgaatacagggatggaatctagctctgaggatgagtttatgagccttttgtttggtacacgtacaagtccagcacttcaccaatttttagtcagctcacttggtgaagcggtatttctcgcttccataaaaacttcttccctatcctcttctctttttttttttgagagaacctgtctaaacttgtcgtttcctatgtggataggctctcaagagaatagctaaggctgttgatagtgctggacgagaacttcgtgttgttgtcagtgagcatcttcaggttagccacttccagctgatgtcacagtctctaccttttttttttgtgttgctttgggtaatgggtattctagagtttgtactttgtaaactaggcaatttcatatttttctttttctgctacacatggtactatcatattttgagtgagtagttttatttctacaatttatggtatcatttatttgagatccaagcaaggaatatcagctagtctgttatgaacgctgaatgacttgcttattacagcctgcagttgaaattatttcattcagacttgcggaactaagaggccttgcaagatggcgctcacgatttcagaacgttgggttagatgaaaagcttatttatggtgtgactgagaagataggaatgctagttgttcaagttgagcgtttttcaagggttgcggctactgttctttatctggtaccattcttctctgcttgttttcttgccatgttctcaattctcaacctctgttttaacttaggccttctgcccgagattcccctccctggtcaagtgcacagaaccttttgtgtgctcgaagtattagtagacaatatagactggacacacatttgtctgctaatttggcactgattgttaaaacaaccaattacattttctgaattcaatgttattatctgtactctagactctagattctgttggtttgatgtagtatcagaatatgacatcttggtgcatgtagtatctgctgaggtaagatgtcatattctgaaactacatgcacaacatcattagactgaagattaagttcaagcaaaccaaggtaatccatgttgagcatgtttactagggggataattgtttgatatatttgcttccatgctctattctttcctacatgatgttatgattatagattgtgctacgactttaagggttattctgtagtaacttccatttatggatatacttttcagttccaaaatttcttcagttgggttttaaagtgtgttaagattttattaagtgaaccaaccgatcaagttccagctgcgaacaggttttgtcttttccccttctattattcccttcatgctcaagttgtgagtcaaacactttgtcattaatcacctgggtgtcactttttttttgtagtgaactcgtggtgctttttctgaagttccttcttgataaggatccaatcaaacagttacttgatgcaaatcaaagatttgagtgtgatttgtaagtaacaatgaaacatgccgattgttggttattgtttcctatgtacaatttggtattgtgttctgcacatatctatgttacctgtttgcaagctagtaattcaccaatccttgttgacaagttaccttgcaatgtgcataatatgtcaaaacttgtttagtatatttaaacgttacacaagtgcatggttatgtgtgagagtacctccgaacacgaacataactttcaaatgtataatttttagtcttttttgtgtatatatactttatctcttggtgttgggtactgtattgctttcaaaaagaaaacaatactattgcttcacatgaaatccagtcgttgaatatcttgatgtgtacactcttcttgtgccctgaatccaaagcagtgaaaatagtcaaaagctattaaattacaaagggctgttgcctgttcttatgttgtgttttttcatcactattttagtttctctctttgtgttattgtgtttttctgcatttcttaatcgtgttaaacctgccttttcagggacactgtaagacatcttgagcagctagtagttttggggggatttacagatacccattttttggaaaagactttaatgaagcaatttaatgagctggatgaaaggttccagtttactactttattttttgattatcttagagttattttttactccttctacataatttgttatctggaaacagttgaatcagagttttgacagtcaaatccttgtgttctctgtttatatagacatagccattttaaatccattgctcattgcttaaatgtaatcaatttttgtctatcatatgtttcagcctggaggaggctttctcgatgccattcaccactatttcttcacaaatacattgccaagaattgcttcctctttatcctatcacgtcatcggttgacttgtcatcaacctgtattctgacatcagtgtcattctataaggttcatgtttttttggtgacttctgcttattccactacagcatcattataaaatgaacatatgagaacacttcaataggcaataggctggctcggggaaggatgtttaatctcttcacccatggtcctaggagtggttcgggtgcccatctcatctttagcaaatgacatagctcttagttgacttcaaatataatgtaataaaaaagtgatatttatttttctgttttgtacttgtcttcaccttatctatattgtttgtgttaaattcttatcataatattaaatgattattcaaaatagcaggatgaagattctcagaatagtgggtcttcatatagcttgactgactatatatgcttcaagatacccgatggatccttgaacttgaagaattgcattggtgtgataaaggacttctctaactcttctgccagcggaccatcttcttcaggatttctattgcatatacctgatgaatatgagtgcgttgatgtatctctttacaaggtagtactccctgctgcatcttggcgataattcaccttttatacattatttctcatagctcacaaaagaaatggttatattaaaacaggacagccagattgttgtactactcagtgaaaggtcatattctgatggtcctggaagttcttatattgtaatgctgcagatggagaacttctcttttgtgcctctctcaaggatgttcccttcaaatatttacagtgtacaagagctgtcggtaagatctttgcaaatgttcctcttttattcttttggcatccactttatttcatagcattcttacactaataattaaacggtaacctggtattggcaataacctactgcatgtctcctattcatcattgtgttatcacaaacacaacttattactacgtgaccaaggccatatattatctcatcaattgtagtgattaaatgacacataattgttgaaatcgaccttacttttactgtcagaaagtaatatcttcatttccgtaacgcaatgaatgtaggcacaggagctccagttggacaccgactatgggaaaaaagttcgtagcatacctcacgccgtgtccactccactggcagtcagtggtgagtttgagtgtttacttccatacaagagttttaagttgctactcacttaacatgatacgtgatgccagagttcacatttcctggatgttgttttcagcctcaagaggagtggcttgtgtcttttcatctcggcggcatgctttggtttatatccttgatgaagatgaggatgaggatgaggatgaatcttctgatatggaatgatcatttttatctgattcacaacagcttgcagctcatgcgcagtaagtgccatctcttttgctgaaaaaggacggaagcatgtcatcttgtgccgtgccgtaaaaaaaaaaagaagctgaaatccttaccataccatacagtatgagtaacgccgttacatttggcaggagtcaaggcaattatgttggcagcctgaaactaagccatgtcccgttttgacgacctgtgcaaatgcaattctttggtctagttctgaagttgtcgcgggtcgtcgtcaatccgctgaagttgtggtgaaactgtgaccagcatgccaggctctaaaactggccaggattcaggtaaatggaaataaggcagctttgaacgagaagtagcttgaagacgccttaaaatttcgtgatttaccttggcctgatcgtgttgcctgttactctgttagaatgcacggtgttgcactgctcatcgtgcgaagacgtgttggtaacctctaaaaggcactaggccaggttgtcatgtaacagtacaccaggagactctatcatgtgggtcaatgagttcgagttcctctctggctttgttctgttctgtactactcagatggggttaaaaagaaacttgcgaggtgagctaatttaactggggagtacttagttgtggggtttaattgttttctgggagtaatactacgtcacatttatgcccgttgtcctttcatacgagcggtgtcatttcttcatactccagaagtccagatcatatagtcatcccagaaaaaaacaattgctgtacaagtcgctgcaagcatcactagtgggcctcaccatggcactatatttttttttgagatctttttttatagaactccatggcactagatccaatacagaatatactagcactatgtaaagccctaacgttgtgtggtttatgcatcgtgattactgtcattacatcttggtatagaagattggtgtaatcttacgtcaatttatcatccatctttctgccaaaagtaccaaatcgcctatgctaaattgctaatacccgcaaatgctgccagctgaaaggcagcaccaaactcttcgaaaatgtggcactgaaaattgatagagctatcgtactccagtcattatacatttattattattacactgtaccaatacggcaatacgtgacgttcactgaaagatcaagcagcttagttccggttggaaaaagaaaaaaaggaaaaaaaaactcttaactggatcgtttcatcagttgggacgctaaacttgttcatttcactcggcgacgggaagcaatctgacggcaatatgtgacgctctgatctgatcagtttttttttaaaaaaagaaaagcgaaaaagaaaagaaaaggaaaaagtaaaaaagaaaaactgctgcatctcccgcatcgcgcacccacctgctcgttcccagatctcttcccccctcgcgcatctcgcccaacaacctcaccggcgaggcgcgcgcccggcgacgaggaccccgccgccgccgccgccgccgccgagatgtacatggcgtatggctggccgcagtcgatcccgctcgacccgggggactccgaccgcgtggtcctcctccgcgtcctcggccgctacctcctcgccgtctgcccggcctccctccacctctggtccgccgcccaccacaaggtccgcctcgcccgcctcgaccgctccccggaatccctcgccgcccacggcgacaacgcccactccgtctggagccccgacgccaagaccgtcgccgtcctggtcagccacccccacactgctctccccccgctttgctcctgctcgctctctacgcgcagagactcatcgagtggtttgtacgtgcagacctcgtccttctacctgtacatatacaagctgcagttctcggggaagccgctgatcatcggaggcaagccacaaccggggctctgcctcgcctccatatcgcaaataatcgtcgagaaggttcctctcgccaatgacgctttcataacgtatggtattcgcttcgcttctttattatccgaaaaacgagataccgaattcatgcgggggagctaacttttgcaagtgtgatatcatatgctgcaggagcaatttcgtgtgcgacagcaagagtatgctgcttggactgtccaatgggcacttgcaggtcatctcctggaatgctgaggtacatggaaatgtattctgctactgtttctctatgttattgtttgatgagatggggaaatagttatctccttgcttgatctgtgcttgctatgcttagtatgttccatgtattgtttgtttgcagttctcggacagcttcaagcttggctgctccgcatgttcatccaacagaactcccactgtcggagatgctttggtgtttgacccgcctagtttgcgagaaaattctgatgcaagtcctgcaccctgctgcacagggaattccaccattattcatgttgagttgtcagtgaagctaagattgctagttgctttgtactcgggctgtcagattggactttgtgcagttggtaagaagggattaaagcaaaccagcagcatcagagtagagagatggttgaacactgatgacgcgatgtgcacttctgtggcttctgatcagcagattcttgctgttgggtgcagtagaggtgttgttgatttatatgacctagctgaaaatgcaaggcatatccgcacaatttctttgtatgattgggggtaagtctcacacaactatttgttagttctgtggatagctgttactgcctaattttctggtggatagttgcaaatttgtgcttatttagaaggatatcctgcttgcacagtaacagaacattaggttactttccatttaattacatatcttcaatgcaaatttggattgcctggtggtttagattaaatacttaatctgtatattgttttctccagttatgtacttaggtttgattgctccacttatgcagacgtaccaattagttaatatttggtctctgattcattactatgtgtgattttgtgtatttactgtgcaatgcatttcagttattccgttaaagctgatatataactgtccctttttcctttgggaaaaattgtaggtattcagtggaagatactggtcctgttacttgtatatcttggacgcctgacaattgtgcttttgcagttggatggaaatttaggggacttactgtgtggtctgtatctggatgtcgtttgatgtgcacaattcgtcaaaccggatcaaattctgcctcatctccaatggttaaacctagtgctttaaaatttgagcctctaatgggagggacgtcacacattcagtgggatgattatggatataaactatttgcagttgaagaaaacttgtcagaaaggattcttgcattctcatttgccaaatgttgcctaaacagaggacttttgggcacaacatatactcgccagattctttatggtgaagatcgaatcctattggtacaaccggatgatactgatgaacttaagatgttgcatcttaatgttccagttaagtgtttgatttcatcaaacttatttaggaggcaaaaatgcctcaatgcatcttatttcaagacttgttataatatagtttttttttctggaagcaggcatcctatatttcacagaattggccagttcttcatgttgttgcaagcaatgatggtatgtacttggcagttgcaggctctcatgggctagtgctgtatgatttgcgcaataaaaggtggcgtgtttttggggatgttactcaagagcaaaagattcaatgcaaaggcttgttgtggcttggcaaaatagttattgtatgcaactacattgaatcatcaaatacgttagtcttgcttcctcactttctctgtttctgtctgtttattgtcttcagcctgagattttcttaacagacacatgacaatttttacttgtcattacatttgagctgagagtttcatgcacaaatctcatggtgcttgaactcacagaatactagctgaaatgcatagtgtgctaatatatcagagagccatcttctgtatctcctagctttttattcctatttaaataccaatatgcgggcatgacttgctatctatttagttatatgacatgtttgttgcacttgtcttaggtatgagcttctctttttcccaagatatcaccttgattatagctcattactttaccggaaatcacttcttggtcgaccaattgtcatggatgtcttccaggactacatacttgttacctacagtccatttgatgtgcatattttccatgtggtgatatcaggagaattgtcacctgctagtagtcctgttttacaggtgaagcaaaatattttcaaccactgcaccgaatgtgttgtccatttcatttgaccttgttgttttctttgggtcagcagctttcaacagtccgagaactttcaatcatgagtccaaagagtccacctgtttcgatgcgcttcattcctgaaccaactgatgaaggaaagccgaaacatgatactaatggatcttctgacttgtcccaacaaccttcaaggtacttttttcaaatgttaaaattgtaaatgatttctattctccttaatttttatttgttttgttatatatatttcagatgcctaatcttgcggatgaatggggaactttctgtgttggacatggatgatggacatgaacaatcacttactaattcagttgaattattttgggtcacttgttcccaatacgaagagaagggtaatcttatcaaagaggtttcatggcttgactatggccataaggggatgcaggttagttttattgttttcttctttattatttttaaggaattatgcttgtctctcttaatagatcgaacatctttccacatcttgctatccttttatccaacccttctctttttttttggcaggtgtggtacccatcccatggagaaaatccttttaaacaagaagatttcttgcaggtacagattttgtatcttgtgatagtattgacatctcttttgagttttgcgatccactctgtgaatttatcaattttttttggggaaaaacttgatcaaaatcataatagtttcatatgttgttttctttcttgcattgaactcttattggtggtagtattcaaagttaatggagaacatgctatttgtttctgcagctggatccggagcttgaatttgaccgtgaggtgtatccgcttggtcttcttccaaatgttggtgtagttgttggtatttctcagagaatgtccttctcgactgcagagtttccatgctttgaaccttctcctcaagcccaaacaatattgcattgtttgctgcggcatctccttcaggtaaatcaaaacataattctttttatatagaaatgctatatataggaactatatgacattaatgcaagaagagtggtaaatcatgaaatcttcatttagtcaagaaaatttgactcctagtaatattacacgtgaaattgagttctcactaaggattatgtgatggtgcaaaccaagcgaaaaacctgtttattgtcatggttaaatagaaaatgacctgatttcttatcaagactgacgtgagcacccaaagtggtctgccaccatttattgttatttgagcatctaaaccttgtttcaggccactagttttaatttgtataaaggtgtctctattctgttgctctgctggctgaatgaaccaattcactaggttgtgcgcatttgttcatcattttcctttggttcttccaccttttctctgcactttttagtattccgtagaactcattgctgaaacaagaagagtataggttttatgggttgttggccatacttgttctttcctctggtttagtccgtttatatgagatcctcttttgtaacaatttacaaaccactgcactgtcatgtagtttctcatatagtttctatattgtaatatcttcctttgccgagttgtgctgcaagacattttgtttgttgcgaatctagcacttacctagctcttctatcaatcacttctgtaaagggatcgaaatattatattctgaaatttctattaaaagaaacagttttcacatagaataagccatatgtattatgaaccatagccttgggaaaaaaaaacatttttttttcactttgaatatcccctgtttacagggagcctttacttggctacttgcatcattttatgtattatggaccattaactatgcatggtttgccaaactcatatggcaataatcatttccctatgcatctctcattctgtaaaatttttgaaaccagagagacaaacatgaagaagctctgcgtttggcaaacttgtctgcagagaaacctcacttctctagatgtttggaatggctcctgtttacggtatttgatgcagagatatcaaggtatattggttctaacttggtaatggtagcattcttgcattatttgtgtaccgagttgctagatttcattctattgtgttatttgctgaaatattattctgtatcctattttctggtggctttttttgccaattgcagccaaagtgcttcaaaaaaccagctttcgcagaaaaatgaacctgcaaagaagtctcttctagacaagacatgtgacctacttcgaaactttccagaatacatggatgttgtagtcagtgttgctaggaaaactgatggtcggcactgggcagatcttttccatgcagctggacgatccacagagtaagtgtgctgccttgttgtttgagtggagagaagtggcatttgatttatttttttcagttattttttaagatctgattcttcattctgtctataaacatctccaaagtccaaagtacctcacatattcttcttttataccatggtgcaaacagtgtttgtatcatggaaatgatcagaatcaaaatgaaatttagtgaaaacaaaacttacccaccaacagtgtctcaatttgatcaagatttggaatacaatacaataattctgctaattcttttagtaaaactgatccctcatgttctaggatgtttgaggaatgcttccaacggcgatggtataggactgctgcttgctacattctggtacggtaaactcttctagagacgttaaatactataaagtccagtatttattgcttgcatgaacagacaatttcttcatctattaagtttgataaacctagttatatgcaacagagggtcatcaatacctgcaagaactattgctgaaaatggctttgctattacaggtcattgcgaagctggaaggccctgctgtcagtcagtactgtgcactccgtttgctacaagtgattctcttaccttctcactgtcagctggttttgatctgtacgtttacttgtttcacatttccagttctcactttttagtgcttgttactatccaggctacacttgatgaatctctctatgagcttgctggggagctggtatgatattcatgctatatctttttaatttcctataataaaatgccacagatgagtaaggggataccttcatgtacctaggttcgcttcttgctaagatctggcagagactttgaaaatgccagtacagactctgaaaagctttctccaaggtttctgagctactttcaattacgttcaccattcaagagacaatcttctgatttgagaaggtacattgtgaagttaacttaaaaggctatagagtttctattagaaaatatgtcatctgtaaatctttctttgtgcagtaactcaatgaaagagctcagcccacatattgcctctgtcatgaatattctggagaaccatgctagctatttgatgtctggcaaggagctttctaagctggttgcttttgtgaaaggaactcagtttgatcttgtggtaagattttcactgttcatcatcattaccagtcttgttgatccaaaaccacatgttattaatatatttataactttatgcaggaatatcttcagcgagaaaggctagggtctgctcgactagagaattttgcatctgcacttgaactgattggacaaaaggtctcgttaacaaaccatgaagcattatttagtgtgttccatttagtagcaaattttcctgtaaaaaaagaaaaaattacatgattttttttttgtcttgcctatcaatataggaatcatgtctagcttttctactttttttcttcataataaataacatttgggcctgcaaaaaaaaatattcttttaaaaaattcaatgctctgtaatcctgaaagatgaaattcttcaatttaaaacaaagcaacacaacaggtattaaccaagatcacacactagataagattttgcggtcttggattatttttctcgagttttctgctgttttctcctgcagtttgtacttttacaaagcttgataatgtactgaattgattgttcatgatataaaattacgaatctgggcaagcttagtaattatggatgtttgtttaacaaatagaatagtgcttacttgagtaaatcactcaatacctgagcaaccaatataccagaacaatctcgctgatattattatctgccttggatctttgttctcatttataattgatattctgatgacagcttcaaatggacactcttcaaagtcggcttgatgctgagttccttcttgctcacatgtgttctgtcaagtttaaggaatggattgttgtgctagcaactttattgagacgcgctgaggtactgcctatctttcacatgttcaacaattgtgcacacaatttcagaaaatactgttcttttgactaacttgtggcaggcttctgcatctgacaatgcagggttttttttcctcattttgttttttggatttttaccatggattgattattgaatgttttgtaagaagcatactcatccttgctgcacacatgctttcttgtttctcaggttttggtggatctctttcgacatgatttgcgactgtggaaagcatataacatcaccttacaggtttacaatcataaaatattcttgtttgtacggtttatgaactttctaagaatgtccctgacttgcttacaaacaacttgcagtcacatgatgtgttcagagagtaccttgatcttcttaacactttggaggaggagctttcatctgtttctgatcttacattgcaaaatagaccagtgtcatgagtgctgatggcactgggaaatcaattggacggataacagtttaacctgtgttaatttaacacatagtagatggagaggcgcaggaatacaatgtaaatagcattttttggggggattttccccttagagcaacatcttggaggccatggcagttttttttgcagagaatcagctacttgccatattgttgtaccattagtttgttgaagcagattggagtgtgcattcttcccctttctgtaagtatgccttgcacactaatatgtaaagtatgtacattgggaaggttattgtagatagtttttttactttatcaatgaatctacttttttttcactcatctcagtaccgaatgcttcttactaccttgcatttcatgatattgttatgccatttttccttggctaattaatgaagtgcctgaatctgcagggggaaattgtttctctcgaggaggttttttcctcggcccttttgacaggtcaatacttagttcgtaccctggatgggaaagttttatcatacagaatgttattctacaatattaggagatgtatttttgtacaacagtaacatcagaggtaacacgtatatttcatggcagtatcatgtactacctccgtcctaaaataagtgcagccgtgaatatccgtgtccaacgtttgactgtccgtcttatttgaaaattttgtgaaaaatttgaaaatatttagtcacacataaagtactattcatgttttatcatctaagagcaataaaaatactaaccataaaaaaattcaaataaaatgaacggtcaaacgttgaacgtgaacagtgcaaaactgtacttattttggaacggagggagtatatttctgaattgacgcacactttctttctttggtaaaggctcctacaagcataaatttacaagatgcaccatagagtttaaaaaaaattcaaaattacaccatgtttgttaaaaagtagtatcacgtacacgtagctgtctatcgtagctaatcactatcacaacagcatatagcctaatagccatatgcattgcactgttcactgatgtgtcgtgggcgcgtgtccccctgttaaggcaattaggcatggttctgaatagtcatcaacatggattgctaactattgatgttggatggctaacgcctgaaagcgtttgagtttggaatgtactcgacgcccttcagagctggccacggaccctttattactttccaagtcgtttggtggttttctttgtcacgatggccatcctcatccattgtcagaattaccgtgtcctgctctcagatacttcctttgtcaaaaaaaaaaaaagataacttttgagaatgaacctagataattttttttgtctaaagttgttttttttttttgacgaatggagtatatctttggttgccactttcctgtcagcagctcgtgagcatcgaaagccatgatgctgtttgttgttcttttcctgatggtaataattggcaatgcccatcgaggactgtcagctcgatcgtgaaagcgagctggcagctagcgctgcgcctgcacatttacatcacctgggaagtgacaatctgtaaagtggtggctgccgcgaggacggaactgagccactccctgtgctaccgatgcgagacaaggagcccatccagccgtcgatcgggtggtccaacccctcctccgccgtccgatcctgccgcctccggccgtccgccgagccgttgctgtccggcgagctggatggagcgtcaaccttggaagcatccggctgccattccggtcgagtggcgcgcaacgcagccccaaacctgaggaccggaaacgatgatcgcgacgccgacgtcgagcagagcggagagcactgtgggagaagccagaaatgcagagacattcacacacggaaaggggagaccaaagaggcggcccaatcacgcgatgcgacctgcctctattcgacaacgagatgtttgaagtgactaaactcgagagggcggagatggccggcgccgattggttcggcgccggagacatatgcctggaaactcgcctatacggaggagatcgccgtgacacctgtcttggttgacagaaaaatagaaagcaagaagctgtccagcttgcttgatttcatggtagtttcacgtaggattggtaaggaggggaaatggccaaaaagcttgtggtatctgggttgcagtttcgcatatgccatctgctgcagtattacaggatggttcgcgtgcatagcatggcggatacgtgaaggcacgagctgacgaccaatttggttggctccgggagacttgcacacgctgccgcggaaacgcagacgcggcacacagcgcaacggcaactgcagccacaggttgggttggcgcccgaaagaggcagcagatagctctggtctgctgcctttttttcgttttgccagcgaaacggccgttacattgttgggaatcggcaccagtgctctttcgtttttgtcgtgccgtgccaaatagccaagccaacaaggcaacaagcgacgagcgcgacgacgtcttctctgtgtatgaacaagcggcgaggcgaggcgactacgtcttctctgtgtatatgatgatggccttgggctctctgaaattaatatcgccgcgtcactcgtgcggctaaccttggtctacgtgccaaaagttgctggaccgtacatagcgaaaaatatccctaactcaaatgattgaagtacatgtaaattttctaggaatggtctaattcccatagtaagaagtgagataaactccaaaaaaatgatcgagaagtagtgttctttgtttttgagagagaagtttaccctttctgagagatacatataccaaattcagaaattatgtattgtaaatatagattaagatgtatcaaaattcatattagaaaatgttattaatattggcacatcttaaaagtcataaaatcattctttgagaaaagaagataacatggtaagagggaccacctaaaaatgataatgcaaacacatttgaaagcaaaaggggaaatatatttgtagtaaatgggtttgtcagtaaaggaaatgcataaacatagccattgttctcccttttgtgtagtggtaataactgattgagaataggaattccttgttccggccaatagggacttgtatgaacctatttggagaaacatgttactatgaacagaaaaggaacgatgtaggagtatatcctaactaaacaaaacagctcactcatgcataaatgcatatacatgcagcctccactgaaacatgttaatctcatactttgtccttttcaatagcaatgttctatagaaataggatatactagctggcggctagaaatgacggaatgtacgacagaatggaaagagcatggagcaccttttttttttattcaagcattatttttagggcattttctttagtggaagcaactccttataattctgtacctgctccagacaaacctgaagaacatattctccgtgcccatctttaagttccataacactctttatcactctttgtgctgagagatacgcatggtttgattcttcctttagagcataataccaacgatattggtagtctcactcctttcattattggaaaaaaatttgggtgtgatctcaccaattcttttcacggtatatatcaagcataagtatttctgagtcatagcctgatgcgatttgtggttgctttttggtgccatgggttccatggttctctctttatgcgtttcccagatgtgaatattgaaaaaggatatacagtcttattgccacttagttgttagcaagcttaattacaacttggctgaaagtataattgcaacagataatatatacccggcatgctgtgtgctttgacttggacgatgtaaagtcatgttcgtttagaggacctgtcaattttattaataaaattcctcgggtcgtttattcaccgccggtggcccggcaaaaaacaaaaaataatatatgccctctctctctctttttttttgcatgagattatgcttttggagagaagtgatgccacaaataaaagtgccaattttaactgcgtatataggacatgcaatggatcgattaaaggatgggtagagagtagagactggagacttttctagcatgtcacactgttatcgagacttggtatatgagaagagtcgcagggcaaatgcagttcataaaaatgggattgttgtgcctaaatagtaatcagattttactatttgggtaaatagttaacgtggttctccaagttttatttaagacctagtttgacttttaatgttttaatctgcctatattagtacttcaaaattttattttagttcaaagttgtcattgggcccacttagatgccacaaggataaacataagggcatgtacaatggtctttattagtggtatctctctattgccatgcaagtaaatttgatgacatggaagaaagagaaaggggtatggttgttatgcatgacaatggctcagagtcgactcttagcatttattagagcaaattttgttgcatggtggtaaaagaaaggaaaagagagtaataaaaagtattttgatacattaatggttagagaccatattatctctaactgttgtaagatgactagtctctagataacgtagagctcatatctgactctacttttgtacatgccctaataatcagtaataagggtgattagattgactattcacctttatttattatttaaaaaaacactaatcagattttgtctatgagaaaacagatagggcaaatgtcctaccagaagggattatgaaaacgaccaaacaaagtcattccgcgttcgaatatcaccttgactgtaaattcgttgacaatttgtctacgctggttcaaatccagctcggcccaaaaatctagggcttcgtgaatatgagttaaatctattttttttcttccataaaaaagaatatttgatccatagaaataaaagaaataaaggataaaaagaaaaggggaaatatctttctaatctatatctctttcattcctctcttacaaacaaaagaccttttcttattggttattgaaagataatagccgttgataaacacagtactacaccgaaaatgacagttttcaatgatatacattgacatggagacgtcatatttctaattaaggcacatactgcaacatatccatcacgccttccctggtaattgtgactaaatagatagtttagtttgaccacctatatcttttttaatcatctctttaattaccatgcatgggatttataaatttatatgcatttaccatgtaacatactttggtaaatatagtatacttttaatacttcaaaatttatttataaaacaggagtggtcaaactaattaaaacaatgcaaagtcaaggctactaaactaatacctcctcttttataagcgcactttcaagactcctaaatgatatattttttcaaaactttataaacttataataatatatattaatacttctattagtacgtaatgaattaagtattaattattttaaaacataataatatgaatttttaaagcaacctttttatacaaagtattttttaaaaaaaaaatacaccatttaacagtttggtaagctttcatgtgaaaaacgatgttcttttattctctttgttcaacttaaaacacaaccaaattactactataaatctggatatttatagttagaaatatttcttcaactggacgcgtcggaagacatcatttttcatccttgcaagtgctaactgcaaggatggactatccggcggtcagttgacgactcgttccatactttccatgcgtgtacactatacgagtaaataaaagtctacagtacactaccggtcgcccagggaaggaagatgaaccccagccgcaaaccaaccagatgagatgacctctctacaccgaaaccgagcggccgcacggccgaagcagccagcgaacaaacgaacaacaaacacgcccctcccccgccgccgccgcgtgtacaccgacccaacccaaccctaaacaaaacgaaacaaacacaccagaggcgtgatccgatcccgcgccgcagccacgccacacgccacacgcctcgcctcgcctgtgcgcgcgcacgacccatctcgacgccgacgagcgcgacgccaccccacccgacccgacccgaccacgccccggttcgtcccctctctctctctctctctctctctgttgcgttccaatggcggcggcgatggccctcgcgtcgcgctcgcgctcccgcgagtgacatgatcccccccccctagccatctctgggggagaatatccgcgcgcgcccgcccgaatcaaccttcctcctccctccctcctcctctccctgcctcccctccttcaggcggtttcccacctccgccgccgccccgaagctattggttgctcgctttgcttgagcgccagatcgccggataggtacgcagtaacgccgcagcagcatccttctatgtctatccctcgatttatttgctgtgtgctgattttgtcctcctctctttttttttcttggggggtgtggggaattgatttttgtttgtttgtttgtttcttctgttcgttcttatccttttttatcgccctatttctgcgggagaaaaaaggggagccttttcttttctgcgggctgaacggcgccagatattcatcgggggtggaatcggttgcgatcttttgttccccttgtgctcgaggggaatttagccggagctggggttcctttcatttgccacggtgttgcaatcatcgaaatgttttcttgactgtgcttgcattcagcttgtctcaagattttttgttttggggatttatatcaggtatttgtgggcagagttttttttttcagcctttgcattgtttggtgttcatcttttgtggatcgaagtgcgatctttcactctgatctgaggtaatcagacaaaaaagagagaaatttgttggttatgttggaattcaatgagtgtttgttgtgtatccttctgataaaagatggagatttttttttcttgaatgtgttcataatcttttttttaaaatttttttgttcttcaggaagagactaatcggcgcaaaaaaaaaaagtgaataccaactgtttgatttgaatcgtgtgatgtacttcacccaaatcaccccaacttggtagcatttctcccagtctccgcacgcatggcgcccgctgctgcccctgccagcgtctctgcaggcagcgccgaggctgatggagcccctcgcatggccaagttcctctgcagctttggaggaagcatcctgccccgcccacttgatgggcgtctgcgttacgtcggcggcgagaccaggattgttatgctgccgcgtgatgtatcctacactgacctagcagcgcggatgcgtgagctctatgaggatgctgatatcatcaagtaccagcaacctgatgaggatctagatgccctggtctcggttgttaacgatgacgatgtggtgaacatgatggaggagtacgacaagctcattgctgcaggagaggggtttactcggttgaggattttcttgttctcacagcacttagacgatgaggccgcagcagcggctgtccattacaatggagatgagagagagacagagaggaggtatgttgatgcacttaatagcctcggcgatgttagaacaccttcctctcctgtatccgtggagcagctctttggtattggaggcaacgagtctggaattcctgatattgctggtctgcggcatttgaatgttcctcgcccttcacatagccaaaggtatggggagatggattctccttggagccctgcatatatctctccagggcactatggagtgcatgatcctcgagattttcccatttcaccaaggtttcaagttggagcagaagattttgatgagaggattcctgatgactttgtaaggcattcgccaaaatatcggcattatgaggttcattcaccacagcatgtggataatttggtctggcttcctccaggcgctgtaattcagcaaaacgcaggcttcccaggtaacttgggtcgccctggcaatttcttggatggaagcagtatgtatgatcactgccgttcaccattccataagggtcaaggtgatcctcgatatgtggatcctcgttggaggcctattcaacattttgaccaaacgagcatgacaaatgagtattctggtcaccctactaattcatgtccagattgcaaccgccctggtgagcgttttgtattaaaccaagatgttagactggaaaatggtgtttatgtcaaagagcagactggtggtcaccctcctcccatgttttataacgaatcgcattctcatgatagagcttggcatgcacatgcaaaccaaagccatcagcgatatgaagatccaaggttgcatatgcctggtagtgctagagcgatggaaccatacattgttgacaacagctcagttacatctctcagtcgatctagccatgaaagtccgcactattttcatggcagtagtgagcatgtcagtgatacatatcataaccaacaagttggagtcggtgggccatatgtccagacaccaggatttgaagaatctacaggtcagcattatagccactcttcaacatatggtgcagaccccttttaccaaatgcagcagaatctgccaccacttcaatctttgaggagaagagcaaatagtcctgtccatacaggttcaccctatgaatcaccacacctgccaattccaaatggcaactttgtcagaaatacaggtgatgttagtccacggattccaggtatgcctgcatatgatagaatcccaaacccatggccctcacccaatggaagcataccatatcgagttgttggacatgatatccctgctgttgtagaaaaccggtcaaatccaaacagtggccagtatgttcagcctttatttgcccctgaatcagtccaaaatcaaccaggagctccactgatggagattcatcctgaaagagcatgcggtggatctgttctatcatcacaagttgatggcagagtagctgcattacccctcactgatcagttgtccaggatggatatcaatccattgaagaaacttgaaggtccagagcatgagaagtttacccgaaatgcgaatgaaacaacttctttgcatgctatgaatgatccaagtgccttgacccaccatatcggagttgtacctgaagttgatcccaaacagaggaagcctgtcgaatatgaaactgtcacaagtaaagtgcatgaaggaggggctacagcactgcaggaatgtggggatatttcagaggatagattgaatttccttccagagctggctgcatctgttaagaaggctgcattagaagattctgaagagaaagaaaaggctcaacaagatgctggtcccactcttttgccgacttgtgatgaggaaggcaatggaaagaagttggaggagacacctgctggtgtaagtaatacttgacctttacacattactggcttagctacctagtgctcttaactaaaatcctttttatgtgcagaatactggtacagatcaggattctgatgtgcatggaagtggtgagcagcagaaaagttctggaattgaggctacaaccgctgaagcagaagctttatcaaaaggactacaggtgttttttctgatctcttgatatgtagtattgtttttaattcaacattgtatcccgcttatatgctctgtttggatcatgcagactataaaaaatgatgacttggaggaaattagggagctaggttcaggtacttatggtgcagtttaccatggtaaatggagaggatgtgatgttgctattaaaaggataaaggctagctgttttgctggcagaccatctgagagagagcgtttggtatgcttgattgacttgttaacaccttagaacttttaggattgatttcatagctttttttttccttgttaaagatttctgttaaaaccctctggatagtgattttcttgcttttgtgtattctatggagaagatctctagttcagatatatatgtggttttgcagattgctgatttctggaaagaagctcagattctaagttcacttcatcatccaaatgtggtttcattttatggtgtagttcgtgacggtcctgatggaagcttagcaactgttactgagtttatgatcaatggatctctcaaacagtttttgagaaaaaaagacaggtattacttgtttaatcaaagaacactatgattcttttattctcaaatatccaaattctaaattaaagcaactgcacaggacaattgatcgccgtaaaagagttatattagccatggatgctgcatttggcatggaatatttgcatgggaagaatatagttcattttgatctaaagtgtgagaacctactggtcaacatgagggatccacaacgaccaatctgcaaagtttgatccctgccctctcatcttcatttcctcagctcttgcttcaaatggttgttacctgactgtcatcccacctccattttctgctcagattggtgatcttggactatcaaaggtgaagcagcacactttggtgtctggcggtgttagaggaaccttaccatggatggcaccagagcttctgagtgggaaaagcaatatggtgtcagagaaggtaagaacactggctttataaattataagcacccttatggatcataagtcattaaaactaatgttcttcattttttatattccaactgaaactgatatggcgcttacttgtagattgatgtatactcgtttggtattgtgatgtgggagctgcttactggcgaagaaccatattctgatatgcgtgctgctgctattattggtaattttcaaaatttccactagtaagctttatcaattatcacagtgacttgtttcctgattgcgaattccatcatgtccacccttcatgtttagcgcatgccatttggtgttctgcagaagatccattcctttcacaaatgctttttggaaacaattttgaaaggcttgtgtaggctgaactatcggaaatgggtcagatatgtgttgaagttatgggtgcctatactaattatcaaatactgaagttaaaaacatgttagcgtaggtaactgggttaaatttgcatacatcgtggtgctcaacttggatgtggtagttgccgtctagcagatgagatatccatgttctttaggtgcaggtgtatttttatatttcttcccccttctaatttcttttataggacgactctgtttcatttgagtcgtgaaattgaggaggtcaacgaaagaaaataagtgccaggatatattcttatgtagtctcatatttagtatagataattgcaaagagggactgcttatatatatccagacgctagtgatgctattgtaattgatcaactattcttgtttgtcactaaagtgatcacttatcatatttattccagggggcatcgtgaacaattccctacgtcctcagatcccctcatggtgtgatcctgaatggaaatcactgatggaaaactgttgggccagtgaaccagcagatagaccatccttcacagaaatatctcaaaggttgaggaagatggctgcagcaatgaatgtgaagtaaaggttcacaagccatgcaaagtttcctacgtccagttcccttgatacaggaggaaggcaaactcagaacaagattctatggagtaactatgatatggatgtctttgcagcattccagtttatcctagttcaattgttaatctaatgagttacacggaggaaaaaaatttcatcacggaagttccagagcaagtttaatgtgagttgatggttttcccttgttttattggtccctctgataaaaatccagagatgattttggtgctgaagtttccatttcttgatgcagggattttcgatcctggaatcatcagctgtcgtttgccttcctcggggaacagtatgctatataccttatcctctggacgggaactatagaaatagaaatgtaatgtaaataagcttcggcttgcttcttccggctggcacatgttagatgtgcacagtagtagacactgttcaaagttggacacagttatctttttgcacaaaattgtgtcctaaggaaagaggggacaactcgaacagagatatccttattcagattgtaaatagctcacgaataagatttctatgtcacttgcaacatggttcttccctgtatagatcatcagtggcactattcctcctgggtccatgcaattattcttccgtgccaatcaatccgtcgatgtttctgaaggatgtcaatagtggtggtgcatcgcttaaaatgaccttgtctttgtttcatcttttgacagcgtagtttgctatgaaatatcttcccagaacaatctcttcataattgggagaaattctgagccagaactcttcataataagagttgctagcatttttcttcatcataaatccatccttttcatcgtataataagtatacggcatcaatcatgtggtgtcaaaatggacttgcagtattttctattgtcattcctccaaccaagttaattgccaattttgcattgtcggccatcagattaaaaaggtttatcttgacagttaaagcagtagaccccatgtttttgttctgctcgcaatacagtattaatggaggacgttgtttaggtggctctgctccatgaagttatatggattgtatgctggctgtctcttcagaacatctgagattctcatttcatttcctagcattcatttgctatacctgcctgcccttttctttttctccttttcatctcttatcttctttgtgtagcgcattttaagcaaaatttaactcttgatttctgcacctgctaccacgccaggaattctcatcttgattctatctctgttttaaatcatatactcagctagtatattttgacctttgcacacacagtgacactaaattatgatacaacactgttttttaatgatcttatctcttatatgcataggcatgtgagctattttagggcaagcatggttcatatggagcttctttagggtaggcttgacattcttttctcctgtttgctcatcactgattagcctaagcctacccttgaaggatctgtcttaacaagaataaaaccaggccaagttgcctaccaaaccacacaattagccaccctcctctagcctgcactatcttagcaccaaactacacccaaagtcaaaggcataaacaatcggagaccggccgccacttgtctccgcttttcgtcatcttcctccgtgttgcgttgcgcggtttgaatcttattgataaaaatgaatgcgagatgaggaagacgaagacgaagacgaaggcgaagcagagactgattgttctacatgagattgagaatatggtttgtgcgcgtaggtgacaagtcaaaagtgtcctgggacagaggggagagtttgtgtcattgtgtgcaatgcaatgtgtggtgtatgatcattggtggatggattagtaggtgtggcacagcttggcttcttctcctcctccttcagacacaccagctagctctaatctagctagggttcatgctgggtcacaattaattgacaatgcagttgattgattgcaatttaaatagtgcttacttgtttcctttttgtgtgcgtttattgtgatttttgcctgcgtttgccaggtgtaaagcaagtgagatcatggcttggaataagttagtattagtgtctggagaatgagttgccttgctatccatggcagtagttttgtgctgcatatgcagtattaaactgatagaaatgacagctccaaaggagacgaggcttgcttaccttcagtacaagacattctgatttcatgagtcatcatggatctagggggttttagatcccagaattagaatagctccagaaggttggcaagttcctagccagtttatcaataatggtttgtggtggaaaatgcattctttgtcagctaaggatttccatgttgttctttgcaaatggctcgtcagtatactaaaatctaaactgaactgtatatcagctattcaggtccagggtatcacaaatctcctttgcaaatgtcttaaaaagtttacaatttcagaggtgtttcgtgtcagctccaagatttccggttttcgatttggcggtaactaacttgaacctgaggcctgaaatttcaaatgctgaaagatactgagttcttgaatcctgcctgctttgcgacatcctaatcctctctgaagttcagaaaacctggaattcaatattggggcatgtgttggccttggccgttggttgtatctgaaaaggcagaatttgacacgatggcaacaagctagagccccaaccttttttcttctcctgttcttatcaatttaatcaaatccctctgtcctagcaacgcaacgaggggaatctctccaactgagatttctccagcaggaccagcacggtttcatcactgacacatgcaactgattaatctccttttttttctctagctatctagctaggttgtcatccataaatgcaagaaacaattgccactaattaacaacttgcctgtccatgcaaaattcatactagtagtagaagaactgatcaagacatgtcaaatgacagttacaactccacaattcagggctgacgtcagcgagcttacagcatcgccaataggtttgcagagctgacacagtaataaacatgcaaataaactgaaaaggattttaatactgaatacacagagatgaggcaccctgtttttcagtaccacaactgatagagatttgtgcaagcaacaagtttgataggaagaaacagtgattgctactagtcaaaacagatgtgtcatgcgtgcttcaagctgaagcaatgaataagatatccatgagactctcactcactaactaactttctttgtttttcttgcgttaaccgatatctttggttgatgaacttggtcactatgtgcagacagtgaaatggcagggagcagagcagcctgccaatttgccatcatttgccaatgataagagggtgaaaatggaggggaaattgaaccggccctgacgacagattggtgtctggattgatgtgcagtccaatctcctgtcattcatttgtcggggatgtatgatcagccaatgtgaagtggacattgtaggcatgtggtagcaaccaaaaaacattcagatcggttatggacaattgattgataggacatggatggtataggtgctgtgaggttttgttcctagatgagggcggagtttagttccaaagtttttattcaaactttcaacttttccatcacatcaaaactttcctacacacacaaacttccaacttttccgtcacatcgttccaatttcaaccaaactttcaattttgacgtgaactaaacacacccaaggttttttatcgtctatttgttgtgccgtgcgaccgactcggagccaggatgaacgcaaaaaattttcagtccgcgtaaatgacgatattgcaaggtctttttatcttgaccatctaatttacggttacgtgaaggaaccgtaatatccctatatgacacagaatgtgttgaacgatcgcaccgctgatggatataatatagctctatcttcgaatctgatggaattcattacttgaattgcgtcaccgtggatcgagtgattgatcgagccagcttgaaaaatctctcaccattgtggcacaaattagaccatatccccactttcattaccactttactgattaccttattatatgcattcatagcgtctcttgtactttgttttggggtacagcctctaaggtcaagtactatgcatgcgatcaaatgctaaactccaatgaggctcagcaaagatatccagttattcccactgcctttcctccccccttttcccaactttttcttcccttgtgctcatctcttttccctttgccaagatttaagactgttcatgttgctgatgacaggcaatggccattgggaatatgaccttgtaggaagtgacaagcaggaaaataccaaatgactccttccatcctttctccttgctagcttatgaagggttgcatattttaagccatcttgctttaggttaataaagtctatcctgtggacttgatcaggattaacttggattgccttttgagaaaaaggtggtggctctattgcatccatctagttttaccatcgctgtcttatgagtcactgacagtggggctaatgtgctccactctggtggcctgtccccacctgtcggtggcttgacacttcgttaggaccaatcaattgttaatttttacgtcgatgaccaggcaaattaatcatcaaggtcaatatgtgagggctcaatttcacggcattgtgattggtattagtttagtattagcaatatgcaatgtaaagtggtagccttttgccattaattcccaacagcttcctgtttggagcttcttccatggtgcataaataaggatgtggacatttgtgccacttgtctagacagtagtgagtgagctagctagttcaactcaatcagttttaagagattgattgccatagtaagttagttatctcccaaaaatttccttcacttggatgcatggttgttggttaattattttttatcgctgtccaatgatcatagttagttagagagttgttgggtatatactatcactgtaaatattatctactgaattacagtgatagttacatgcagctaaccttgatactaaagtattattgttaattatttcccccctttttgagttttgccacatctagggtagaagagcagagtagcactatccacatagctaggcaaatatatggcatttaatagatgaacaagttttccaagttagttaggtggcacaagaaaacaagcagccaacagcagcatggaggactgggagaagatggtcaaaacaaaagaatatgcatgagctcttgatctgtagctgggagaccatagatgttggcagtatgcatgcatgcaaattaaaattcttgataaatttgatgatggaagaaaagaaaaccatatgtgcatattgatatccccatgtcttggtagctgcctgcagtaaatgaccgagtcatgtacacgtttctttctttcaattcgcttagagttcttgcctctttcagtctcaacttttcttctgaatcttctctttcagtctgcatgttctttaactagatagcttttctctgcttttcttggtacattctctgaaccttaacttggattcaccatgcctgacgtatgggcaggcagcccggccttttttccgtttcagaaccacgcatagtgacgcgtttgatcgagaagatttctacgaccagattgacaaccagctttaattgttcttttttatgaaaagaatgtacagtcatatatacatagataaatttaaaattaacctcttctgtctcaattctgaagcaacacgtatacagaaaacacaagttctacatatgtaatcacatagtaagctaggtaaatatataacagatgatgatggtgatgagatcattacgtgcacatctagtagacgtgtttaacgcagcaaggtttactgcacttgagaacatctgctaatagttcatcggtttggcacatctgcttggaccatccattaactatgctcatgtttatagtcaatgactagtttgaaacagtaactcctgagacagaggcagaatttcaaacatgaaaccctgaaagtcgtggcttcatgggcagtccagccaacacgacatctgtgcagtgcttgattagctacttaaatataataacaaaataattaagcaaagctttttctttgacaagagttgcagggaccacgaatgttaggtctgaactcctgaaggctcatatgatcccggcataacactgaggctaataaaggtgacagagggagaggctgctagctgctgaatgcagtgaaaaaggtggtggttttgtggaggaatttgtcaatggcggatttgggaactcagggagaaagaaacggatctgggtaaaggtaggcatgcatggaacaggggattggcatgcgtttggaagggttttgtcacacgccaaatcgacatgcatgctctgctgggatccattgcgcacactgaataagtgggcatatatatcaacaaggacacaggacgtccgcaacgacactggatctgcggtactgctgactaacatatgtgcccctacttagagcatctctaacagtctttctaaatcggtctctccaaacacccatatagccagctgtccaattgatttggcaagccaaactcatttctcactccaatagccactatccattatgagcctatgacactgggacccacacgtctgcctctactactccttcctcctctttctctttctctccctcttcctcctctctccctcttcctcttctctcggacacatcccgcgcgactgcgaccatccagaggctggcgatggcggcggcggcggctcgcgatgacgacctcggcaacgacgacctcgacgatgaccggtcaaatccacgccgccagtctggaggtcgcacggccggcccaatccggcaggggttgcatggtgacataggcctccaaatgacggcagccatggctggtgacgacgcaaatgacggcggccatggctggcggcggtggctgtcaacggcggcggtcgcggcggtgctcctcagcttaggggatggtgggtgcggaggaaggtcggggaaggcagcactcctccctgtggatggcggccacggcaaaaggcgatggcgacgatgctcctcccacaggtggtgacgatgacaaggcaaccgaggggatacgggggagctcagcagggatggtgagagccggtgtggcggcagagctagagggagaggagaagcatggatacagggagaggcggatagaaggatagccagtctgggaggctggccaatattggccagtgcgtgggttgagatggagaggcatttggcttagagagtcgaatagagagtctattgaaggagtgtttttggttcatttgctaaatttttggcttggaggaatagagaggctgttggagatgcttttactcttaggagtgggtaatactacttgcaagcgatctcgttccatatcaatatgtaacgactttctttttagtgtgctaatgtcatcgtatttgcaggatcatcgcgtgttgtttatcgtatatgcacccgatgacttcaatgaagtccatatgcgtcgacgcgtagtttctcaatgaacgtaatccatttacctatgttgcctttgatagttttgttttattggaaaaaaaaatgaagcaaccctgatcatgttaaaaaggagaagcatgcgcatgtcataaagtataaaccgtgttgatcaatgcactattgttgatttagtcatatgacttagctctagtaccattgtaatagatcatgcgcattttgctaaacataatggattgatatttgcagtatactgataaaagatcagtttcagaggacacacacctgtaagtattcatggttaactagtgcaaatcaattaattaaccgatgtcagcagcagctagcgtaataatcaaaagttggcttggcagagaagatcttggtgagtgcatgtctgacttgactgcatggtagggcggcgtccgttaatccccagcaacacacacacacacacaaacacacacaaaaaataatgtggcggtgtccctataatggagccaaccgtcacatcatcacctcacaaattcacaattctcacaagcccacacccgtatttttctcccggtgtccggtgcctccttcctctctagctatccatctactaaacctactataaagccagcccggccacaaccccagatgcacccgctcaccgctgctgccaaacacgccatcaccataccaccaccaccaccaccagccgcagcagctagctacacatcgtcgccgtcgtcaggcactagcgatccatcggttctagatctctcttctgctgagatagacgacgacggcgacggcgacgacgatcgagctgagcagcaagaaatcaagaattcgaaggagttagtgatggggagggcgccgtgctgcgacaaggcgagcgtgaagaaagggccgtggtcgccggaggaggacgccaagctcaaggcctacatcgaggagaacggcaccggcggcaactggatcgcgctgccgcagaagatcggtaagcacgcatatatatatatactcctctcctaccttgtgttctttcgcctagcttaatttgctcttgcttcttcaattcattttgctgtttctggacttctctctagtggctgatttgtgtgttattagctagggctgggcaccgaccgcgctgtttggtcttccttatgtagatgttgtaacgcacaaagcccccttcttatttcaattaacatttggtcagcctaatcttgggctaacccagcaaaaattgggtttgttttcatgaattctaatttatcctgctagcaattaatttccttggttatgacaggtggttgctagcttgctagtgcaagttaatcatccatatgtttagcttttgataggtagtagtatggtttttgttgtgtgattgagtctaaattggggattaaagcaaaacattttttagagatgcatctaatacatgctattttccctcttttgtatcacctgtatggtggattggctgttttactaatagaaggtaaagtttatgtagacttttgatctaaaaggggtgaactataacatgatcatccatttgtagattgccctatttgtttgtcgtggagtgagagatctagatcaaaggggatcaagttgattttttttcctgataaattaagagggatcagcttgaagcacacatgataattacatgaacctaaacttgagtagtctgttaatgtctagcacactggaagatatgccaagtagtttgatcttagttattagttaaattctagctagcttgtatttgttgatcttcagtagtatgcatgcatagcccttcaattctcctcttatttttgtctctgaatactggagcgcagtactagctaatggttgtctatcctagaccatttcatttctgtctcctgatctgatgcaattgggtgctgtataattcaaatgaatttaaagtatattaattgcatatgattattgtagggctgaagagatgtggcaagagttgcaggctcagatggctcaactacctgcggccaaacattaagcatggtgatttcacagaagaagaggagcacatcatttgtagcctctacattagcatcggtagcaggtaataatcaccatattagcaacttgtcctctcatcgcatgtgcatacataactgcatgcacacacctctctatctacttctactttcctcattctttttcccctttcatctcagagactaacacgtacatgcatcacttactaaaacatggcatgcactattaataacttcagctattaattatcaaaacaaaacaaaacaaaacaaaaactctagctaattactaataatctccctaaaaaatctagataatttagtagagatgtgctaatgctagttgcattcacaggtggtcgatcatcgcggcgcagctgccggggagaacggacaacgacatcaagaactactggaacaccaagctgaagaagaagctcctcggcaagcgcgcgccgtcgcgccgcgcccgcgcaaaccaagaccactgcggtctagcaggcagcgccgccgccgccatgtgcggtggcgtcggcaccgcggcggcggcggcgccgccgcatcaagccctaagctcgtcggccctcgagcggatccagctccacatgcgcctccaaggcctctacaacagcgcgttcggctgcaccaccaccagcagcaacggcggcggcgtcggcgtcgcgccgccgcagtggccgaagctcgaggcgctgctgccgagcagaccgctcccggccgtgcagccgacggacgccgtcgtcgccaccgtgcaacacccccatcatttggtcgtcggcggccataccctcgccaccgccgccgccgccgccgccaccacgtcggaggcgttccaagccgccgagcacctcgaccctgcggcggcgaccggttcgaactacatgccgggagtcgccggtgtagagatgacctcgtcgtcgtcaatggcgggtggtggtgggttcgtcgccggctacggtctccacgacgagctatacgacttcctcttcaagtgcgagtcgatcggcggagcgcaaggcgggatcatcccttcgtcgttgccggagctgcagtgcccggacggcagcgccatcatcggcgccgacgagaagttctcgacgtggacgtcgtcgtcttgcgactacggttcgggcggcgccggcgattacgttctagggtatgatcaataatagattttggtgttgggtgctagctacacatatatatattacattcagtgatatggatccaattgttaattgatagctagttggtatatgagataatatgcatatgtacgctcggtttcgattgatcttgaacgtttctgttaatacatatatataaatgtatgtgaattaaattaaactactggtttaattgccatgttttttgtatgagcattagtatcatatcgatgatgttatacatagtatgtgagtgtgaaatacacagaaataaaatgcatgcatatgtgtgattaattcaatctccgtgtctatgcatgaatacatacatatacttggatagttagatatagccatatgtggtactcctggtctcttggcagctgtgaaaggaacgaaactctagagtttttactctgtgctctcgaaggtccatttgtggtttttagctgacattgccgcttctgggatttcttgtgagtgtagcgtggctctgccccttcccgctattcggagttgcgtttagccaccgtagtagttttttcctagcttcagcttttgttttgctttccttcctttccttggcataagccggtctggctgattgcattgtgtaacaaaatatttttttcttctaatatattgacatgcaattattttgcgtgttcgtgaaaaaaaaatatggctatatgcaattatgcatggctctcatcatattcaaaaatatactcctagccctaggagcatgagattgtccaatggtagtcctgttcttgtgtagatgctacatcatctcggtttccagagacggtgccctatgcaactatgctatatatatataatagtagtattgatgtatactgatcgatcatatatgcatgctaatttgctgtgttcaattcaaagtatgtagtcagtagctagacagctatttgttggcgacttggcgtcaatatggcgaacttgcggcgtgcttacagggctgatttgagaacctttgctgtactgacgatagatagaactgttttgttaggcatctctagttaagattcagaacacattatcgggcggtctgactgaccgacctgcctgcagtatacctacctgtaggtcagtaggtggaaacggtatatacgtcgcacgcgtgcgtgctttatctcgaaataaaacctgtgacaaaatcgcacgctggctgatcgagttgcttgaaacttgtaaacataggctgtgtttagatggtgaaaagttaggaagttgggaaaaagttgatagtttggagaaaaaattggtagtttttttgtgtgtatgaaagttttcgatgtgatgtaatgtgatggaaagttaggaatttgggggaactaaacacggccgtaggtggaatttgctccgtccaccctttctcagtcgttcgatcgggcgatcggctcagtacaagaggggaaggagaaagggtgatgatgtggtcaccctaatatgtgaggttcatgtgggtctcatactgagccgtcacgtcgaacaaaaccgcggttaaaatcacctaaggatgcagagtgatctggttttgtaaattgagagatatcatatatttttggtttttggttgagacatagacaattttataattcggtgataagatgagggatctcatatgtactttttcctattatatactccagtatgcaggccgtagctgcaacgtgaggtactatatgggccgtaacgggattgagacggacgttcagcccatactagatggaccgaaactgtgaaaacgggaagcgcttggcccttcttgctaaatgtccgaaacggtatttgcggcccagttccagatgtcctatgtgcaacgcaatatgagggccgtggcaatacgtaacgtgctcgacgtgcccgtatattgtgcccaaaatgtcgcaatccatcgtgcgacaaaatctagctggctttgatatgttagacatggacgcaaatcaaattatgcatatatagcttgcttggactttatcttgcttagttatatatgcatgccaaccataatcttttttttttgaaacaaatgccaaccattatcgaacatgaacgccactccttcagccctggcacgcactttcccagccaaaaactctcgtactccagctcgtataaatacgaacgtaacacaaacatcacgcctgatctgatcgatcaagcgaaaaaaatcgtacttaattaggagcaagcaatggcttctcgccgcctcccgttcgcggcggtcaccgccgtgatcctcctcctccacggcgccgccgacgccaagtcgtcgtcgtcgtcggggaagacgaagagcctcgcgtcggggttcctggacgcgcacaacgcggcgcggcgccaggtcggggtgccgccgctgcggtgggacgagaggctggcgtcgtacgcggcgcggtacgcggcggcgcggagcggcgccggcggcggctgcgcgctggtgcactcgcacgggccgtacggggagaacctgttccacggcagcggcgtcgggtgggcgcccgcggacgtggtggcggcgtgggtgtcgcgggagcgcgcgctgtacgacgcggcgtccaactcgtgccgcggcggcgacgccgcggcgtgcgggcactacacgcaggtggtgtggcggcgcaccacggcggtgggctgcgcgctcgccacctgcgccggtggccgcggcacgtacggcgtctgcagctacaacccgccgggcaactacgtcggcgtgaggccgtactagcgaaaagacgtgacgtgatcgatatcgagcccgtgaacgacacgcacgcacgtacagtgtgcaggggagacgtgatttgggtgcacgagtgattgctggctaattgaatttgttttgtgttgttttggacaggtttgtgttgaatttgttcacggggatcttttgttcagcggatatatatatatatatatatatatatatgtatatatatatatatatatgtatatatatatatatatatatatatatatatatatatatatatatatgtatatatatatatatatatgtatatgtatatgtatatgtgtatatgtgtatgtgtatatgtataggaaccgctgattatttgttacttcttgtcattcattttattggtgaaaatgccaaatggagaaaataataaggttattttaacggaattttgttgcaaggtcgtcttgcagcagttatgcataatactccctccgattaaaaaaaacaagctagtttaaaatacgtacttcctccgtttcacagtgtaagtcattataacattttccacatttatattgatgttaaagaatctttacattgtgaaacggagagaataccagttaacaagagttaactttaagcataaaaatcatcgcaaagtataggttttatgataggaaaatcgtatattcaagtttctcataagaagaccttttaaaatattagtcaaagctgtgtaaagttgacttcaataaggatttacgtagtacacttgttctatttttaaaagataatggatttacgtagtacacttgttctagcctattgttaaatttgttttttattgttaatctaattaagtacataatctatggtactaatatactctctccgtcattaagaaaaataaagctctaactatgaatctgaataagtacttttgtctagattcatatttagagttttttttaaaaaaaaacggaaggcgtaaatccaaccgggttgagatgtttggccttggttttctctggcgactgaaagttgcaagcttacattttacatttacagcgtttgtcaagacatccattgagggaacagtttacactggttcagacaaggcaataatgtgataatgtgtacaacaagcaacttcgtagtagtactgaactgtacacttcaaattctgaacacccgacactgagctgtcttctcctaaccctgcaattatcttccatccttctttgttatgctgtcccaaagcaattatcactcgtacccaagtactccagagaacaatgtcaaaattgtcatgctgtttttctgtttagctagtgcaggggacgccaaaagtctttccatcagctccatttgtttcgccgcatattgggcatagttcttgacagacagtgattggcacgttgttcatcagtaggtacataccaacagaaaccttccaaaccatgccaatacattcttcgtatatattcctggctattcggtaggtcagttctgaatgagtgagtgataatggcatctgtttctgccataaaataaacgaaatctgcgacgcaaatgcaacgttgtgatgatcacttaaattagtaccacccagatgcacatggtgttttaccacgactgacctcttgacctctgagatttattgattagattataacgtaatcgttgttaactgcaaaagctgcacttgccactgttcctttcttgactttcagagttcacagcatagttcagaattcagaaacgaagtacaagcggttaattaagtactcactaattaacaatggagctgtacgcactagtagtaattcttttcgagcaatgaaagctgtctgatgggcgctggctatcaatgtatgtcactgtgttgtcatttggcagccaatgtgagttgtaaagaggtagtatagcgtcttttcgagagcaaaacgccgtggcacgatcggtgctacaggccaagtcaggcggttcgtcatgatgaatccaactcaccaaaaataattctggtgcagttttatttcagtcctctgctcttgcatccaaagagctagacttccctgaacaaattggcatcgattttaattaccaaacggtaacggaatgaatgctgtgactaaattagctggactgctggagtagactctgacctgcatagaactaactactataattagttcgagattccataaaaatcaaagaagctaatcagttcgtcctctcggcgcagcctgcacataattgaactgctaattttattctagtcggaagcacatttaggtagacctgccttccatagtcttgtgtggcgcaatcattatcgaacatggctcctgtccccaacaccatcatctaaaaaatggcttttttactctcaacgtcgagtccatatatacggccttgagctagcgcggtggtggtagactggtagtggcagtagtgcaaatccacagctcagcattttgcctcccatggcgtcctccaccgccattgcccttgctctcctcggcattgtgcttcttcttcccggcaatgccttcgtcgtggtcgcctacccacgcggcggcggcggcggggactacaggatgcagttcttggggcagcagaacgcggcgagggcggcgatggggttgccggcgctggtgtgggacgagcgggtggccgggtacgcgcggtggtacgcggagtcgcggcgcggcgactgcgcgctggtgcactcgtcggggccgtacggggagaacctgttctgggggagcggcacgggttggtcgccggcgcaggccgtgggcgcgtggctcgccgagcagccgcggtacaactactggagcaacagctgctacggcggcatgtgcgggcactacacccagatcatgtggcgcgccacgcgccgcgtcggctgcgccatggtcgcctgctacaacggcaggggcaccttcatcacctgcaactacgacccgcccggcaactacgtcggcatgcgcccctactgactacccgcccacccaccctccgccgccgctgccgtcgccggtgatggtgacggtgaccgattctttccttggtccgctctgccggccggccgggagcaccgcggcacacggcagggcgacgcagcgcagcaaccaaccaatcttgctgtctcattcattgccatatgatgatgatgatgatgttacaagagtactacaactgtacaaaataattctttctttctactgcacgctgcaacatctttttttttttgcttttttaccttttttcctaccaaaatatatattatgatgttattggtaggatcggggaaactacaatgaaatatgatcagctaattgattggtctgttattactctgttctgtccaacaaaatgagcctttttccccgtccccttctcgcacatttcacgtgtactatgtactccacttttgaacacattttacagtggcaaaatgtgagttatgcagagctgctgcaagaatggaacaattgaaaaggattaaaggaagaatggctaggtggtacagaaatcaccttttctctctctgcgtgtgtgaggcttttaggtgaagagattggtcgcctctgattggtggttggtcggttggcagagtattgcaaagcgaaaacgaccaacggatgagttgttaaatgagtgctactgtacgtatttggcgcatccatgtgcctgtaccgaagacgctcagagcctgggcctcctctctctctctctctctctctgaagtctgaaactctgaatctctgaggtgtgtgcatcatggtcagttggaatccgatgcaatgcaatgcgacccaaccgtttttaatctccccctctaactctgcggcgtcgtctagctgcaaaaacttcgcgcattgatcgccaaaacggtcgagttgaatgcgtagctgaagtatagtggagtagagtagtatcagtggcagctgatgagttaaatacgcgacaatgcctgcaagaagagtacaattatactgtgcgaatctagcagcaaaaattgcagcatcacggcgtcacgagactacgcatacgcgaagcagatgtgatttgggtcgctgcgaacaccacatgtccacatgctacctagctttggacctttggtcgctactagtactaatacaatttactgtatttcttctgcagctctggtcttgtgcagccaatacgtatcttatacacagtttatacgggtcaaagctgaagggaaggaacggtcaattggtgatctggtgagtattatttcgggggcagagcttgcagtactacaatatatagggtgtgtttagttcgcgaaaagaaaatttttaagtatcacatcgaatatttgaccggatatctgaaggggttttcggacacgaataaaaaaaaactaatttcataactctcctggaaaccgcgagacgaatcttttgagcctaattaatccgtcattagcacatgtgggttactatagcacttatgattaatcatagactaattaggctcaaaagattcgtctcgtgatttctatacaaactgtgcaattagtttttatttttatctatatttaatgctccatgcatgtataaaaaaaatatatataacttttttttaactaaaccaggccatagttgcagcctatggtccgccttacatttgcacgataatctgtgctgtgatatacattgtcatgtggcaaatgtcaacaagacagcggcgctagtttaatgccctgccgatttgacaataggcaaaggaacatcagaacatgcatgtgctctcgcaaattgcagggttcatcgttgttcatctcgttcctcccccatgcagccactgttggagcatgtgacattgaatgaaccatgtaatgatcagtaacaataacaatcccttcgatcgaacctgcgcaaagtgtgctgcgttaaatctgagctaatttctggcgtgctactactactttgtcagctgcgcctgtaatttgggtgctgcaactgggtgcaaagtagtgggtgccatcctgcattattgccatctatagccaaaaaacaaatatagcatactaagggaaacgtcacgtttgtaaacgaaaaataatttacgaataaaacttttatatacgtgttcttagcgatataaaagcaaaggcttagcaataaacttcgattgaaaaacctcaaaatcaactataaatttaagatcgaaaatttaaattttgattgataagcataacatagaaaaaatgagatccgcaattatcacactgatgaagatgcccctgctggctacccatatgctggcgcagaaattcgttggtcgttttgtttgtcgatgctccgtataaaactgatcctaacaggccgtcacccatatgctcgcgccgaaatctgccagcggcgcccacaagtcactgaagcccacaaaccagaggagatgcagcatgaaaccgggcgtggtgtcccaaacggcctagaaacgtacgttcctcgcgatcacggcccaacacaccgcacgtacatctcatcctgttccaccatacatatgggctgcacgcctgcacgttcgtggcaattccgctcccgccccattcaagatctcacgagacatagcaaaatctcaaggaagaaactataaaccgagcctccaattatgtcttgaaaaatttagacggtcaaatatttcagctaaccatcggtgaaatattaagttatatttggtgaaatgaggaaatcatgcactgaaatatttatttttttagtgaaacacagtagagacacgttgaaacatgtcactatcacatatgaaacattgagtgttataaattgaaacatatttgtttttttcatcagaatataatcacgcatatcgtagattagataaatagtttagaagaacataattttgaagatcgctaaatggatgcatgtatacatggatggtgaggagagatagtagttgtagttagttgcatgaattttgtgaaacatgataaaggcacatgctgaaacatatctttatcatatataaaacattgagttttaacgatttgaaacacacatttttctcttgttaaaatataatcatacgatattttgttgtaaatatttaattaaacgaatacaatggtatgaccggatcataaatcggataattaatttaggaaaaagatatttaaacaaaggaagagaaaatgataataaactagttaagtgtaacttcctgcgcgagcccaatttttattgctgcatcgatctaccaattgtattataagtggtgataaaaaatttgccactagacccatatcatgaatatatgaggactcatatagatagcgagtgataaatttttaattatcatatcttaaaagtggcaaatagttaaatgcccccaaatctcacaagagaccaagaaggcgagaagggagcaaattccaacgttttttttctctaaagaaatacttaatctccgagacggatgcggaatcgggtatactgtacgacatagaatttgaataggacacggacgtccttatacgtgtacccctttaaatagagagctctagccggacttcctccgatcttccgttcttcaccttcgcatcgaatcgatagcgagtgtacgtatgtaagtataatctcatctcttcctgtggaaagctagctaggtgcatgcatcgatggcggaccggctcagcgagctacctgacgacgtcctgctctccatcctgaaacgtgtcgacctacgcgacgcagtaagaacagcgatactcgctaaacggtggaggcatctcccggccgcgctgcccgatatcgtactggacgtcctctccttcagaaagaagcaggatgatgatcatcaggatggtttcactttcacgtcgagactgtcccgagaagctcgagccaacctcgccgtggcgcacgccgcgaaagccatcctcgcgcgtcgcagcggcgagcacgccatcgaccgcctcctcgtgcggttctacctgagggcggagtccatcggcatcgtccgctccgtcgacgacgccatcgcgagcggccgcgcccgcttccgcgaggcggcgttcgacgtgaggggcgagaagcgcgccctcgagtgcacgggcagggacacgcttgcgaacgggaggcggctcgcgtcgctcgtcggcgggtgcccccgcgcgttcgcggggctcacgcggctgcgcgtcgagagcgtgacgctgcgcgggtccaacgacgtggcgaacgtgctcgccgcctgcgagaacctggagatcctctccttgcacagctgcgacgcatcagctggctcgaacgtggcggcgttggagatggagcacccgcggctcgttcgcctcgacgttgacgcgtgcgacttcgagaccgtagatctcaagtggctcccgaggctggttcaggtctccaacaacatctggttcccttcacggactctacctccgcttgtttttggccatgttccacagctccggacagtactctccactgtcggtacagttaactacagaactctcaagctaagcgggcttcttgtcaatgccaccggcatacgtacactgcaaatgatttttgagagtgaaaaggtatgcatgtaaaagaattggttgttcctcgtacgtgtgtttctgtttcaggtttgaagtgtcacgtttgttgattcgtcctgactgatttttgtgcagatctggttccaacctgaaagcccgaaacatctggctccacttctccgcaatctgaggattgcatgtttggacaagattcacaaggaatgtgacctcatttggacgatgtttgtgttagaagctgcacccctcttaaaggagcttcgcatatcggtaattgctactccctctatttcaaaatataagtatttttagattctaaccctgtctccgagatgctaatttgaccaataatatatataaaaataagggcttgttcactttgatgccataaaaaaaccttaccaaattttagcattgccaaaattttggcaggatttcttatatagttaccaaaatttggcagcaaactaaatgtcaccacttttttttggtaactttaccaaaatttggtaaggttgaaaatggtatcaaaatgaacaggccctaagatgttttaaataaaaatagttgtatattataatagtttgtttaatgatacatctagtaatatcaattttacatgattgatttattattattattatttctattaataataaaagttaaaaatgtttggcttgtcactatttaaaaaaaatgcttatatttttggacagaaggaataatatatttatatgtattatcaattaaacatgtgtcgtctctaaaacttacgggcatgctcaactaaagcaatttgtcgtcgtgcgtcgcgtacaggtaacagagcactcttgtggcagcttggcagcagcggatgtcatgaggaagctactgtactgcaagaaaaacaatatagagtggcacattgattctgatttcaggcactacaatctgctgttggtcactgttgttggttttgagatcaaggataaatttgtgaaactcataaaacgtctagcacacgcggctgtcaatttggaagatatacatctggaggatgaagtcaaatgtgagaattgtcagtattacccaactacgtggtatccaagtacagacaaagagagagagagttaacgaggaggctgatcaacgaggaaagatcatcgccaataagaatcaatataaagtgatcacagtatttgcaaatgtcttaaattgttgttaaagtctttattattattattttctaaattttcgtggggaacattgttattacttgttacgatgtactcctaaatggttggcatgaaatcactacacttgtgtacacaaggatttcgaaggaatttgacataatttattaggacgtttgaggcatttccaaagaatggggagaggattctaatccctcagaaaggatatccctcatgtaactttttctctcaaattcattgtaaatgtttgtgaatttttttttgattcattggaagactggagcccatgccatgccattggtcggtatctgtgaaagattttttttttcagacggttcaactcatcctgtaaaaaaaaagactttcattgtaaatgctagtgaaatatttttgattcattggaagtctgaaaaccatgccattggtcggtctctgtgaaagcattttgtttcaaaagttttgaagggagagacgccctccaaacatatttaagaagaaattataagtttattgaggattgaatacgggatgtcgggatcgaaaccatagtactgtcaagtgcatctccttgtaaaagcctttgatgtaggagtagtaatgaagtcgcactcatgttcacgatgaatggcaacattttgatagggaaggagcaaccgaaaggaggagagtactgaagtacagtagggtggcgcgggcgccgtgggagcacgggatcagcagcccggcggtgggctctacgtcgctggggtgagtttgtagcagggtaaccggagtagcacgaatctgagattggaccaaagcagcaagcgctagcagacggacctgaactttgcagcctgcaagagaacgtgcacaacagggtcataaatatttaccgattataataagtttggtcatttttttaaattccgaccatgaattttaacttatataaattccgaacatgaatatttgccgcttataaccgtacttttcaagacaaatctacaagtaccatcttttcaaactaagcatttgataaatcattgataattagatttttaaatgtttgagcagatgctgttttttttttcaccacgaagagagacacaaggaatcagccaatcaagagttgggaacataatgtcataatccactagactgcaacattatcaatctggacttgcagagcagagcagcccaccgagggaccgagctggtgcgccaacaacattggcctgtttgaatccggaggggtattaaatagccctacggaattttgctatttaagagtgttaaacgtagattactgacaaaacctattctataacccctaggctattttgcgagacgaatttaacgaggtatattaatccatgatttactacagtgatgctacagtaatcagccgctaatctattatattattaaaggaatagaaaaaagagcctccacgttcgctctcatcgcctagaaattctcacattaatcggagaaaaagaaaaggcagagtccatatagaaatacaatttagaaatagttaaaattcggaattaaaaaataaggaatattagaatatgagactagagtccatatagaaatacaattaggaaataactgaaattcgaaattaaaaataaggaatattagaagtagagtatagagtccatatagaaatacaattaggaaataactgaaatttggaattaaaaataaggaatattagaagtagagtatagagtccatatagaaaaacaattaagaaaaaaaatagaaattcggaattaaaagtaaggaatattagaagtagagtatagagtctatatagaaatttaaaactaactaaaatttggaataaatataataaaattaaaagtagagtttatagtccgtataaaaatacaatttacaaataactaaaattcgaaattaagaaaaacttgggaagaagagtttaaagtcaatataggaatataatttagaagtaactgaaattcgaaattaaaaattaaagaatattgaaagatgagtttagagtccagaaatacaattagaaataataaaaatttagaaagaaaaataaataatattggaagaagagcatagagtctatatagaaatacaatttacgaagtaactgaaattcgaaattaaaaattaaagaatattgaaagatgaatttagagtccacatagaaatacaattagaaataataaaaattcagatataaaataaataatattgaaagaagagcatagagtctatatagaaatacaatttacagaaaatttggaattaaaaaaaagaaatattaaaagacaagtctagagtccatataggaatatatataatttacaaataactaaaatttgatattaaaaataattaataactaacacgtatataaaatataatatgaatattacacattagtagttttgtaaagttattgcaaaatttaaaattatgttgtcattttaatatatttgaataatataatgagaaaacatatatgctattatatgagagaaaatataatgatgctaaccgcgcaatctgcgcgggccaccatgttagttatggattaatatgcatcattagattcgtctcgaaaatagcctaggggttatggaatcggttttgtcggtaatctacgtttaataatcctaaatagtaagattccggagggctatttaatagcccggaggatccaaacaaggccattatcaaggccgagtttttcttcaaacatttgacttttatatcacatcaaaactttcatacacatacaaactttcagcttttccgtcacatcgtttcaattttaaccgaactttcaattttagcgtgaactaaacacaccccaaatcaaagtgtggaacataatccactagactgcaagagaactgtgcagaatgattgagcaccggatcttacgaacatgcaaggtgagaaacgagcaggagttgggaggttgcctagaaaaggaaaaaacagtaaatcgtaacaaaatgaacaaattcactaaaatcgtaacaaaaagaagtgctacaaactgaagcaactactacgctgttcagttacaactttacaagacttcacttgtcacaagcacaactgcgtaggctaaaaagagaattctacacatcctaccgaaaaagtgaaaccattgggcaactacagtaaaataccacaacagcataacgcaaacccctgcacatccaactgagactcagagcagcacatccaactgagacttagagcatgtcaacttaattgatcatataaatcaacgggcaaaacaaattaatgcattgcctgattactaatgcgagaaatttaaaagtactccgctgaaaatcgaaatgaagtaaatctcttgttgagaaggaagttcaggcatactcccaatgaaaggagcagcagcagatcaagtctgaatccaacttccaaagcttcgatgataggctacaatcatcaccaggcatgcttcgcttacttacattctactactagccagaatagtgcctaatcatgtcccaagtctcaactaaacccagaatagtggctacatattagtcatactcacaaaccacacttctagaagtcaggaatcacagaaacaaatctactagatatagaccacatcatgaagacatccatcaggtcccccgagaatgccaagcttcaggagtcggtgaagtgcatgtgcatggttatcatgatttccatgggggagcactggcgcgccatcatcaacagccatacccaagttgatctctaattcaggtgggtcttggctctgctggatgtgtactgcaaaagaaggaaaagttacaaattcatcaaagcaaatacagccaataagcaaatgcaaattcatgaaggtgatccagtaatgccaacgagcaaattccaatgcaataaatgggaaagtacatttctgccaataataaccaagtcaatttccataaggagaggttcaatccaactaacaagccattttcctagatataaattaggtttcaaccaatgcacgtatctatcttcttagaccaaactttcaatacaaccaatatccaggttcttagcaataattgagtagagaaaattattaaatccattttttggcaattattgcagttaaccaagtcaattttcatatggacaggttcaatcaatgaatgtgatcttcttagaccaaactttcaacaaccaatgagcaaatccaggatcttagcaataatagagtagggaaaatgataaaatccattttcttcaagaaattatctcaagaataggtaggcccagttaggctaatgttttaatacaaacagtcttctaaaagtaggccataccacgaggaggcgcgtgactaaacatgcaatgctggaactccctcttcagtgcatcttccattattttttcgtgattctgaactggcatgttgcgctgcagaacctcaagataactacaaaataaagatataaatatgacagtcaggaatacaaaaccatgtgttttaagaaatttgaaaatctgataggacaataattgcatgtgaagaaccaatgaatatttatagtcaggttcacgttagtatcagccataagtgtttttcctgatcagttttgccaactcttaaaactgtaacgaaacgaccaaaaggagacaacagacttccatgttctgataaaatacaaccataaatgcttaacaacattaaaaatatatacaataatccatgttcaaagacataaggtcctacacagcaacatacaagttagttacaaaccagcaaaagcatactagctagtcacacattagaaaaacaacagaaaacctggcacatggtcctacatagcagcacacagggtagctataaaccaacataagcatactaaagcagcagaagcataatagctagttaacacaggagaggaccagccttaggcaatgtgaagtgtcacgaaccagaatggcctaatatagacggaacatgacaacatcccacaaaaggaaatgaacagtacaatgcagcatgagggatgttcaagaatgttgtttctacatactagctaattacaggtcagcaggtaatttgaagtgacacaacaatggaacacataataatttgagactgccaacccctcccacacaatgaataaggaaacagtaacagagtacatcacaccagacgcttggaattattagtattaacagttaaaaattgcatcacatctgagactaacgtagtactcggaaatactaccagaacaaacttaagtgtcaaatacagatcacacagaaattgaaggtaacagagaatcaacaaaagataccaagcaaactacaatagcctgtaaagcaacatcctatagtacaaaggacaaatttaacaaccacacaaaaacaaaattcattgaaaaacaatcagaaacctaagaataaaagaaaaccattagaaaatatcccaaaaaaacatacacctaataaacacttgaaggcataaaaaaacaacagcacaaaaaccctaagatcaaatttacaacacgatcaaaaagccatagtagaaaaaacatgtccaaaagagtagaaaaaatctgtaccacaacagccatagtagggatcttaaacaaaaaccgtgtccaaaagagtagaaaaaaatatgtaccacaacagataacaaactccaaacacaatttacagaacggatgacagatcaaagaaaagagaacagtgcccatacccacttgccagcaatcaagggtcgttctgaaaatgatcaatatagaaattacaagaacatcagttgatactagaaatccaggcaggtgaagatgtacaaagatggctaaagagccaagttgaacataccccacttaacccacaagaacatagacatcctgcagaaacttaaaaacacacagcaatcaaagactccacacaccactaacacaaaacgagaacacggtgatgaacagggcacagagagcgcgagcaggagaaaagatgcacccagtagtggctatccaagatcaaaatcaaaggaggaagagaacgatgtggactaaattggtcagagcgatttcaacctgggtggtagtgtctttttctccatgaggtcgctttctacaactacacgccgcccactttttgggttgctaggataaaaaatccatcacaagcttactatttatagatagtagtatgaggcatcacgacgcaatgctttgctacatcctcgatctctacaagcccactacagcatcgaggtagaaatgctgaaaatgcgggtaaatatgatgaaatgaggcctgcaaaaagcatgggccaatgtggttctgcttgcaatcgagtcacatgataaaatccgtaagaacagctagcattatactaggccggaatcgtgcatttcacggtggcaagattggtgatgggctgatgggcctatgcgtttgggcaatctttggagaaatcagagaaattatcggctcttaagtaagtaatttacctggagaagaacgagccgaacgacctccaccagctcggatctagagggagcccggcgactcagatctagccggatgaaggctccgccagccgctggctcagatctagccagagacaagctctacagccactcgctcagatctagagcgcgtgcaaatccgtctccacctcaccggcggagagcgagcccggtcaagcaaactcccggcggcgcttctgcaactacgacgctggcggtcgggcacggggctgccggaaaggcacgactcgccgctgccgccaccccctcatcccatcaaggagcggtggctgggagtgagccacgtctgtctgaggtcaaccactgcctctcctcatcgccgtcagggaagaggtaggagaaggtcgaccccgggagggaggacggcgagccggaagtagacgctggtgatgggatgggcgacggcgaggtcgtccatgggagacaccgtttggtgtgaggctctctctctctgcgcttggtggaggattttggatggtggaagaataggcggggcgaggcgttcactccgctactcgttcccttcttttatgtacagagacggaaagagtccgcgtgatggagaagctataatttcttacccataaactgaccgacgttctctcactgacatgtcgatccccttgtgggcgtgtcccacaaccagttgggttgggctgaaactttctgccgtaaaaaatatatgcatgccaattatcgctgacgttctctctttataattgttttgtttaaaaagcttccatataacaacattttaatggttggattttatacgattgagagtttgcttgagaatactacttctacccaatcaattttattttaggtaagtaatgacattcatagtatttcctaaatattttatagtgtgcgctgttatgactgcgtgatatttggaaaattatcagccactggttcttttggcgaatgcgtctatttacgggtactcaagccctttttttgctcgttccaagtaaacacgggcttaccgccgtaaaattgggaattcctccatacatggccggccaataaacacgggcttctgctagtacactactagtagtagttttttttaaaaaaaaacccagcttttatatttagaaaaaaaattattcagtttataaggaaaatcgaacccgaaaaccatacaactgcacggtgggaaaccgactgaaacccaccgcacaaaagaagcatgagacctagctacacaactactaacaacggcggagcccaaaaacaggacatcgccgcaagctaaacacaaaagcgatacaatagctctgacatcgcataagaggtgttatcgttgccgagctagcagcccaagcgacctagcagcgctgacttcacaacagtatcgacactgaaaacacgatagtcgccaaagtgaaaagcagcttcttcatactactactcccccgtcctagaatatagcaacatatgaccagatgggacgtatcttagtacccataatatagcaacctaggaccggatgggacttatcctagtaccacgaatccggttataggttgctatattctaggacggatggagtagtagttaccgttcgataagttttgggacggtcaaaattgagcttgggatggagggagtagtagttaccactcgataagttttgggcggtcaaaattgagcttgaaaaggtgtgtgcgctagacacggcactacacgacattagttatgaatatgtttctcaactgtgcccatccaaaggacttttgaaacagtgataactttttcgttttcccttagtgaaatgacgcatttcgttaaaaagaaatactcctaagttttcttgttttaagtaaatcttagtttataatagttaacacttaaatcatcatacgttaatgattcacaccccttcttataaagtgcaacatagccaaccctctattgttttctattttagtcctcatattttatcaatttatagggaacaacaatattttggactgaacacccaaaaaaatataaagaaatatgaaatcacctcccctcccatttatgtctctccatccccctcttcgccggccactctctccttcggcgccactttccttcacccttccctcaccatgaagtagatcaggcggcatcacctctccttcttgttacgatgtcacctcctcctcattcccaaagccgcgggagaaaatgtggcagtggccactccacgccaccaagcttgccaaaatttgacgggctcgccatatatttcccgtgacgacaacaacaaatcgatgatgatgaaggcagctcaggaggggaccactggggcatggtttttccaacatggttcctctcacaccttgacttgacgagtttcttcagcccactgagactcgcgcgaccttgcaaagggacgagcatcctcgtaaggataggacaacatacgaccacgtggctgcctaagatcacacatacgtcatttaatgcaccgcgaatggcattacacaacattgacaccaaacaaacaatttgagaaggaactcaagtctcgtaacaggcagttccgtccaactgtctccatcttcaacctcattgcaaaacatagacaccaatattaaatggtagaataattcctttagaccaagggaggcggtaagagagaatagcgatggatgtggcaaaaaccaattgaaagcagcaacggtggaagcaagctctttctcttccctgacgcggtgtttagttcttagcatgtataggcattgtcgatatgtagtggtatgtttagtaaatttgtgtactttctctgattgtagtctcatgttgtattcttgtaaaaaaggaatgacttaacaatataaaagatgctgtttgtttaaagaacttataatttatcccggcaaaaaataaagaaattatattttctaaggcataacataacaacttccagccgctggcaactcagtggcaacaatgaaatatagcccctcacaaaaaaattgcaatatttctagctgcggcctattccatctatctaaaacaaatcctatcttagccgtatttaattccctttaaacttccaacttttccgtcacaccaaatgtctagacatatgcgcgtagcattaaatgtggacgaaaaaaccaattgcacagtttgcatgtaaattgtgagatgaatcttttgagcttaattacgccataatttgacaatgtggtgctacagtaaatatttgctaatggtatattaattagacttaatagattcgtctcgctgtttacaggcggaatctgtaatttgttttcttattagtctatgtttaatactttaaatatgtgttcgtatacgttaattttttttaccaaaacaactaaacacggcccttgagtcaattcgatttcagaattggatttattttatttttgaggaggagtacgtacaagggctgccttttttttagatttttgaaacggctaattaaccacacgtaaaacgagaaacgtaattaacatataattaattaagtattaatatataaaaaatagtgaatatatttattaggttttttaaacaacttttatataaaaatttttcatgtaaaatgcacagtttaaccgtttaaaagatgtgctaacgaaattaagagtgtgtttgaggagaaggggattaaggagattgggaagatatgcaaaacatggtgagccattagcacatgattaattaagtattaattatttaaaactttaaaaatagattaatatgatttttttaaaacaacttttctacagaaatttttttaaaaaatataccgtttagtagttcgggaaacttacgcgcggaaaacgaaacaatctttctcgcagctacgacagaaaaaagagcgcagcctgtcaaatgaagcacgagcctgggcgcggtggctcaaaagccgaaaccggctaccgaacagccagtcaaatcgtcaaacgggccgagcattttagaacgggctgaacgtccgccgcggtcacggtccaacccgccgcacgcatgacgcgtactttcgtgctcacaatcacgggccgcacgtacgttcgcatcagcacaagtttgcgaaaggagaaacagaaaagagaaaacccagagtggtcaggttcagaagccgacgaggcagccgttgcatgcatcgatctcaacttctctcaagttcagaagcggccgaaatgtccgcggacacgtacgtacacagtacacgacaagccggccgggcctcctgtgacaacggtggtgggttacaccgtttgcggggccttgcggccaccacatgcatgtgccgcctgccgcgcagaagcaatctatggcaaaccgcccggccgaccggccgtgctaccgattcatcataagcctggagtccctggaccttgttgtaagctcgcgcgtgaccacggaagtatctagaagcggccattcatcgtcacgggcgagctcacaggtaacaaggtaggaggagaacaagctttcatcaacagattttgatgaactattgaaaaatctgtagtgcagtatatacagcaatcaatcatggaccgtatgttcgacgatctctcgtcagcaacgattctttcaggtttcttcacagaatcaaatccgtgaaagtcttggtggcctttgtgataaccaaaacaaacccgcatttgcataaacaaacaagccatgatcgaaacgatgtctcgagatgtcaaaaatgtggacaaaaataccatcaatatggctactacagttgctcccacccacggtcacgggtgccagagacaaacactacactatcagccaccgcatataactgcttcctccaatcccaaaccacaatttcgttgcaaacacagcgaccaataggagatcgaagccatgaagctgctcgtggctctgctcgtttccacccttctcgtccactcgctgctcgccgacggcagccgccgagggaaggaggcggcagcggcggcgctcgggtacagcaacgcgacggtgtacgacatgtccgtggcgaagtgcgccgggtgcggcgcgctgggcgcgtgggcggagtcgctggagttcctctactaccacaacctggtgcggctggcgcggtgggagctgccgctggcgtggtcgccgcggctggagtcgtacgcgcggtggtgggcggcgcagcggcgcggcgactgcgcgctgcgccactcgttcccggaggggcagttcgcgctcggggagaacatcttctggggcggggccggcggcgcgtggcgccccggcgacgccgtcaaggactgggccgccgagggcgtcgactactcgtacgccgccaacgcgtgcgcggccgggcgcgagtgcggccactacacccagatcgtgtggcgcggcaccacctccgtcggctgcgcccgcgtcgcctgcgacgacggcggcgtcttcatgacctgcaactactacccgccgggtaacgtcgtcggcgagaggccgtactgaatgagcagtacactaggataccacagagtttgtcaggattgtcctggatggaaatgatggaatgagatgtgcatgtacagctgctgaataaaagtttcaggaatcaggtgtgtgcaatctgcatttctgagttactgtcactgtaaatacactcactggtggttaagttcttatacatttcgttacatctaatgacctttttactagagcgccattgttttgtcggaactgtttttactagagggaaggacggaaggtgaaaacagtgaaaaggctaatggtttaggggatttgggccatagtcgtgcgcttccggcccaatagaaggaatacgcagcctctcagaccaatgaaacgatttgcgtttctcgagtgaagcctccatctgttaattaggccaaaaaaaattatagtaaaagttttgtggatacgtctttagcgatttaaaaactaacgctaaaataaacttcaatgaaaaaactttaaaatttaaattttggtatggctgatcttatataggacaccggtgaggcatgaagacacagagcaaaacggatacatctggatgatcagcttttgaagtgaaggagtaatgtatgttttcattttgcccagtattacctggataagctcataagcggcgtcatgcagaatgaaaaaatcgaacaaaactagctaagagctgatgacatcgatgatattcgaagagataggtttgatccttatggcataaacaaaacgcacgaccaaaaatcatagcatcgatcttcgatctaattcagccccaactaataaccatagataaattatagtacgtatcaagattaatgcaaagcatattaactagcatatcaagaccgggtagatcctaattacgattagcccgtggatcagaagggcttctgccccatgatgttgccctgcggctcgtagtggcacgccatgagcgtctcgccggaggagcaggtgacggtggcgcagccgacctgcgtgctgtcgcgccacatcatctgcttgtagtggccgcactccttgcccgccgcgcacgcgttggcgccgtagtcgtagtgctgcgcctcctccgcccacgccgccaccgcgtcgctcggctgccacgcctcgccgccgtagccgcggaacacgttcacgccgcccgccgccgacgccgccgacgccgccgcgcagtcgcccttgtactggtccgcccaccgcgtcgccaggtccgccaggtcgctgctccacttgagcgggtgcaggccgtagatcgcgcggaggtgcgtctgcggcaccacgaactgctgcgcctcgctgatctgcagcagccgccgcggcgcgccgccggcggcgccgccgagcgtgcgcgacgacaggagcagcacggcggccagcgcgacgcagcaggagaccctccttgagctgtactccatggccgaccacactagctagctcaagaccagtgtcgctcctagcttagctagctaactggttaattgcaggcttcaaaggctaccttaccattgcagttgtttatatatacgcatgcgagctgaagattattgcacaaacagcgttgacaattaagatttaatctgcaactggaagtaccatagatctactgatcgaatcagagttcatgaagaattaatcgatcgacgcagaatcgttgcatgtgatggggcacgtacattgagggcgtcatgcaggccgcgcgtgagacaggacgtcccggttcttgtttgacttgcaattttcagtactgtctcagtttgtatattattcgagtcttttccattggtcggtttgacacctttgggaaatcgatggagcaagtgacgatgtcaaatcatgcctgcctaggatggaatttaacttgcagtttgcaccctgaagtaaacggctggagaagggtagttttctggcttcaatttgtttcggttttccagtgtgtcagtgtcacttacaaaattcatttttggcagggtttttgtgtaagtagaagcactgtgacgaccgacgaagtggctacacatgctttcatgtgggtatgcgtgctagaccacatcttagatcgaaaagatcagtcggcgaatacgtcgaagtttcgttcgtttcctgctgctgttgatcgatgcagcattaaacaatgagcaaaaacagtggcaaattgggctggatttcatactcatactatattcatcgttttgagaaaataaaacatgtacaaattagtattacctccgttctaaaatataacaatctatgactgaaaggatcataccctagtactacacgatcttaagttactgtattttagaatggagagaatactataattgtagagatttgctgcaaacagtgcctactatctctctcttaaaaaagtactattgttgaaaacattactactctctccgttttacaatgtaagattttctagcattgtatacattcatatagatgctaataaatctagacactattatatatatatatatatatatatatatatatatatatatatatatatatatatatatatatatatatatatatatatatatatatatatatatattcattagcatttatatgaatgtggacaatgttagaaagtcttacattgtgaaacggaggaagtacggtataacaaaaagagaacatttgtgaatgggactgtctagacatctgtcgtgtaatttttaagaaaaaatcacccaaattttttctcccctcatatctgcatccaacggtaaaaaaaaaagtacagatagcctgtgattgtgcttgttagtacagtagtattcagtaaagattaacacaaatgttacatttataactaaaattacagtgttttataactaaaaatacatttgtaaaaacagtagatatgacatgtaagtacactgtaattttagtacaagtgcactgtaaattttgttaactagaatatttgtcgttttagtataaatacattgcttgagaaaccgtgcagatatttgaagtgttaaatgttgcatttataactaaattacagtgctttataactaaaattacatttgtaaaagtagtagatatgacatgtaagtgcactgtattttcagtacaagtgtattgtaattttagtacaaagtgcattgtaaattttggtaactagaaaaagaaagaaagaaatagagcgaagaaataaatggctactgatatgcgtgatgtacagaaatccatcaatacaaagtcaggttgactcggtcatggactcaactgaccctgcttttgcgcaaatcttggaaaacatcgtgcggctagaaaaacgtcaaatcctatgaaaaaaatcactcgacaaatatttagcaaaatcgtttgtgaattggactggatcaatctctgatgggcctttagcccattactaccaaacccaagagtccaatacacctcaagcccaatatctcgtagcggcccacgcaataattcaatgaccgcgaaagccaaccacccagtacgccccagtgcatcccagccgctcgatgcgaatccaccatccaatcaccaccgtccattccaccaaaaaaaaggtctccgcgattcggaaccgtcgatgtgggccccacacacacctcgcagccaaccggaaatgcccgcgtcttccagactcaacccctcctccgccacgtgctccctcgccgccgcctccgcctccacctccgcctcgcctcgccgccgcggccgcggccggcggcccgcctccgcgatgggccaggccccgagctcgccgccggggccggggcgcagccgcagccgcggaatctcgagatggccgccgccgccgccgccgctgcaggggctccgcctcgacctagggttgctgcttggccgcaaggcgaggacgaggtccgggggcgggaagctggacctggcgaactggctgaggtgcttcgtggcgcctcccctgccgcagccttcggaggcggaggcgagcgccgaggggagggacgcggggaaccgcgaggaggaggaggccgggaatgaggaggccgatcacctcgtcgtcatggtcaacgggctgtacgggaggtgtgcgtgcgattgcactgctctttttttttggcatagtattgtgttgttttatgctttcctattactagctaattgcataatttggtgctttgggcagttcggcggattggaaatttgctgcagagcagtttgtgaagaggctgccggggaaagtcttcgtgcatcgtgagtttatacaactcgattagttactggcttatttgtaccatttccattatctgaaaaaaaaaagttactgcttttcaattttgctcccgtgtaagtgtttaatctagagggtcttgtggaattggttttgcctgcacattacaaaatgtcttcaatctggaagtgcaaatgcaatgcattgcatttccacaaacaggcatcaagctagttagaaaaaaaatcgtgatttggttgtgcactgaagatgtgaactttgtgcaatttagattacagaaagcttctgtttaaccagggtgtggatagtgtgaaatccctctcaagtttccgttaagctggggtgtagcttgtttgaaattcctcgtaagactagctgtttcaatcacagtctgaaatttgcggagcaagtaccatattagcatgatgtgcattgatgcagccaaacttcacttgcaaagctgcactccagatttagttgctgttctcccatgtctatacctcatactgcccagttgatttgctatgtcctaagcagtaatagttgatcagcctacataaacatacaccttccgtgtctaactaaatttcttgaaacaggcagtcagtgcaaccattcaaagttaacatatgatggagtcgacttgatgggagaaaggttagctgaagaggtacaggcgtacagccaacttcattgtaccaactgtttatacatctactagttcatggtcactgtaatcagtagaacactttatcatcgcactttatatgaagttgcagtttaatacaaagggtgcctaatggcactaatatttaatactcaggttcgacaagttgttcagaggagaagtaacctgcagaagatctcttttgttgcccattcacttggtggtttagttacaagatatgcaattggaaaactgtatgatccatcaataaatgaagaggcttctcttgataaagaaaacttctcaaatgaactgagaacatctgatggtggtaaaatagctggtttggagccaataaattttattgcagttgctactccacacttgggatcaaggtggaataaacaagtaagttgtccagattatgtgtttgttgtgtgtttgacatgtttatctctcatctgattgttagcttttgcattctcaatttgaatccttagaaccttgtaaccaccaaacttatatcatatggcctattgatctaggaaaacattccgtaaactgaaccccatgttgatttttattcagctctgaactcatggagtacttcgttaaaccttccttgataatttttttgggattttgtacgtatgaattcaataagaaaatagtatgaataaatagaataaacctgatcctactctttcatttgtgttcttgacagcttcccttcctttttggtgttccacttttggagcgaactgctgcagtaactgcacattttatagttgggagaacagggaaacatttattccttacagactcagatgatgggaagcccccacttctcctacgaatggctgaagactgtgatgatggaaaattcatgtacatatccagcaattggtgcaatctactatatttttatgtataacatatctatttccatgtaccatgcttgacatgttgttgctttgtgcaggtctgcgttgcgctcttttaagcgccgtgttgcctatgcgaatgtaacatatgatcgtatcctaccaatgtcccactttacttactttttttttccttttttggtattctcttgaactcaaggcaactttggttgcttgtgtccttaacatgttggtaaagatatagttggctggagaacatcatcaattcggcgtcagcacgaattacctaaagtaaattaccatttaaccttttcaatttaggaggcagtacaatgttgctgtgcttttatgctcactacattaataatctggcctgtttatgcatctcagttgcagttaacaccaagtgataaaaagtatccacatattatccatgttgacaaaggaaattcagagcatcatcagcaagaggaatctgtagaagcttcacttacagatagcatggaaggtaagaataactataacatatatatatcaataggcaagcttggttttgatgctctctaaattcaggagactcttgctctgtgtaaagtgcacataagctttattgacgcatcgaactaaaatggtgttaatagtagaggcatctataacaaacccacgaacttaaatttgtttctatgtttcctgctagctgtgcaatgagactttactcctactgttacagaagtgatgatccatggccttacacaagttccctgggaacgtgttgatgtatgctttcataagagctggctaagatacaatgcccaccacaatatccaggtatcttctgctagtcccgcacctctgttgccaatagttactgaataatataatcggcactcctgcagattctttttgtgaaacataatctaagactgataactgaccagtaattggtagttgaactattaactgcaaggcaatgtggctgctggggttttgcgtaaggaccttctatgttatagtagcttctatgtgcattcagtagttatggacaaatactgttgtcgatagatagcccttcatggttcactatatttctcttcttcttggttccacaatcttaagagagaggattttcccgcatgatttatctgatgatatcttaagagagagagagaattctaaacatttgatgtaagctgatgcttggtgcaggttaggatccatcctgttaattcagacggcgaagacgtaatctaccatttgatagacaattttctagtgtagctaaatttcgatgaattattgataaataacagccttttatacggtgggttaactccattgtaccactctagttaggtgatgacacccgtggaccaacatgcctggttcattagatcacacgtgatgtaaggttatcatttatcggagcctgggtgcctctgatttgttgtcttgtagtgtaactgtgtaaggataattgttagattgttaatagtgtaaatgtcggtgtaatattttttgtacatataaattttataaacttgactgcctctggttgtatatgcagttctctgaataaagatgctctttatgcaattctcctgctggttctgtgttaattttggcttagtggtaatataaagcaggagtgcccttgtcaatgatttgagaccgacacacataatcctatgatctgtacatctgttgtcatcagtatatatataccatcgctgtctgttttgtagtgtagaccaaaaaaggagagaggaagcattggtggtcatccgttaacccagcaggtaaaagaagacaaggaacaagataagcgttttaaactcgtttccaagtaggacgtgtttattaatagtcaatacaggtcagaggaacaggagcaaaggtctaaatgagatccccatgctctatcatgaacaatggccttccctccccatttcaatctttcagtggatgaacaatcaaccagcagagtttttctgaagacattggtagcagagctgtgcgcaggaaggaaaatggcatggaactagtacaggatagcaaaaagcttcgagcactagagcaacgaggaagggggaactaaattggttaatcggttagccctggcaatgggcaaggacggcggcgaccccggcggcggcgggtacccgctggtggcggtgtgcatcgacaaggacaagaacagccagaacgccctcaagtacgccacggagtcgctcgcccacaagggccagaccatcgtgctcgtccacgtccacaccaagggctcctcaggcaaccactgcatcccccggacccccgccgctgaaatctctcgtcggatttcaagtttttctctgacgatgcacgcgcgcgtgtgcaggtggcgtggaggacgcggccgggtacaaacagccgtcggacccgcagatgaaggacctgttcctcccgttccgctgcttctgcacgcggaaagacgtaacgcgacgcgtccattctcgtacggtgcagcacggcgtggtgcaataactaatgggggtttttctcgtggctgggctcgcagatccactgcaaggacgtggtgctggacgaccacgacgtgtccaaggcgatcgtcgagttcgccgcgcacgccgccatcgagaagctcgtcgtcggcgccaccgccaggggcggcttcgtcaggtaaccaaccaaccaattcagtctactcatctcatctcgatcgatcaactctcaaaaagcagctgtcgaggaaaccggggtgaatttggtttgtggcatttgaaaagattcaaggcggagatctcgagcagcatctccaagacggcgccggacttcagcaccgtgtacgtcgtctccaaaggcggcaaggtgacgtcggtgcggcaggccgtccgccaggcgccggccgtctcgccgctccgcacaatgatccagggccccaagcccgataacgtgtccacgcagaaatggacgccgccgcctcctccgtccacgacgagacctgacatcgccgggacaccgaagatacaggacaacttcattatgtaagtcgaggggaaagtattttctatgcctagacgtcacgacacctaggtgtatacatgcggtttaaataataatataaaaaattataaaatttgacgagatagattgtgaatataaaacattatacaaactggcaaatataaatttgatttacatataaagaaataaaaataacaaattttatatgcattgtacatgtaatattaactacttcctctgttttataatgttttatattataagatttcctaccattgtttacattcatatatatgttaatgaatatatatgtgtgtggggggggggggcaatgttagaaagtcttataacctgaaatggatgtagtatatatctttttttaaggaacataatattactatctgatttaggccctttttgtttaggcttagatttattggcctagacttttaagtcagcttattggcttatatgatttataagccggtggatttaatgtcctaagtttagtagttgagtcatacatctacctcacataaaccaaaaaagcttctccaacctagcttttggcttaatagtgttaaagtggtttatggcttcaaaaaagccaaatgaaaaagctgcttgtttgtttaggcttagacttttcgacttataagttggcttataaacctaaacaaagagggccttagtctagatgtcttgtatgtttgtctataaaattatatcatcttaattgatattattttttaaatcttttttctataactatttgagtagtatgcaaataacgggtgccgacacctagatgtagaaaaactcattccgtaagcttaagctagtttctataactatttgagcagtatacaaataacgggtgctgacacctagatgtagaaaaactctttccgtaagcttaagctaggggggaagaatggatgagaaacaagaagctaagcttgtggcatttgtgtggagacaggtcgccgttcgcgaggggggcgaacacgtcggtgaggaaggcgttcccggactactcgatgccggagtcgtcggacatctccttcatcagctccggccctcgccggagcttggacctgtacccgccgcggctgtcgtccggttcggacgcccacgaccaccacagcttcgaggcgacgcggccgcccagcatgtggggcggcgactccttcggcagcgactcccagtccagcaactcctccttcgcttcctcccttcccatggtacacacaataatgcaagctagctagctagtacaggctagatttttgtttgcatcagatgagatttcgtcgccatgatcgatcgttgtgatcgatctctcacgtacgtacatataccaggaggacatggaggccgagatgaagcggctgcggcttgagctcaagcagaccatggacatgtacagcaccgcgtgcaaggaggcgctcacggctaaacagaaggttagcgatgaaccattgatcaaccaagaaattataagcatcgcaactttattgttgtttgcatatcatttagaccctgtttagatgggacaaaaactttttagtcctatcacatcggatgtttagacactaattttaaatattaaacgtagattattaataaaacccattctataaccttggattaattcgtgagacgaatctattgagcctaattaatccatgattagcctatgtgatgctacagtaaacatgcgctaattatagattaattaggtttaaaaaatttgtcacgcgaattagctctcatttatgtaattagttttataagatgcctatgtttaatactccaaattcatccgatataacagggactgaagtagtttagtcactggatccaaacaccaccttaaaaggttataaaaaagttgaaaagaaatttaaaagatagattatatgtgataggtcactctacaaacatgcaggttaaaattcaacttctataaattaaaaatatattaattaattaaactatatatagttaatgtgtatccacatttaaatttgttttttcgttgcagttaaatttgatttgtggatggatttatcacatattaatctattttgttttttcctcatatttttttcataaccatttgggttatatgcaatcaatgagtgaatctcctatcaagaatttagaatagtttcccacgttattgacatgttacgtttggattgtggaagttgagaagagttgatgtgatcgagtgtttgatgatgcgtgcaggcgatggagctgcagcgctggaagacggatgaggagcagcggtcgcacgagacgcggctgacggaggagtcggccatggcgctgatcgagcaggagaaggcgaaggcgagggcggccatcgaggcggcggaggcgtcgcagcggctggcggagatggaggcgcagaagcggatcagcgcggagatgaaggcgctcaaggagaccgaggagcgtctcaagtccatgggcggcggcggctcgcgcggcgcggtccggtaccgcaagtacaccatcgaggagatcgagctcgccaccgagcacttcgccgacggccgcaagatcggcgagggcggctatggcccggtgtacaagggccacctggaccacacgccggtggccatcaaggtgctccgccccgacgccgcccaggggaggtcgcagttcaaccaggaggtggaggtgctcagctgcatccgccaccccaacatggtgctcctcctcggcgcgtgcccggagtacggctgcctcgtctacgagtacatggccaacggcagcctcgacgactgcctgttccggcgcggcggcggcccggtcatcccgtggcagcaccgcttccgcatcgccgccgagatcgccaccggcttgctcttcctccaccagaccaagcccgagccgctcgtccaccgcgacctcaagccgggcaacatcctcctcgaccgcaactacgtcagcaagatcagcgacgtcggcctcgcccgcctcgtcccgccctccgtcgccgacagcgtcacgcagtgccacatgacgtcggcggcggggaccttctgctacatcgacccggagtaccagcagacgggcatgctcggcgtcaagtcggacgtctactccctcggcgtcatgctgctccagatcgtcaccgcgaagccgcccatggggctcacccaccacgtcgcgcgcgcgctcgaccacggcaccatcgtcgacatgctcgacccggccgtccacgactggcccgtcgacgaggcgcgctgcttcgccgagatatccatccgctgctgcgagctccgccggaaggaccgccccgacctcgccaccgtcgtgctcccggagctcaaccgcctccgcgccctcggcgaggacaacatgcagctctgcaacaccatgagcggcggcggccggagcagcatgcacagctcgccctacaacagcaactcctccatgcatcaacctcatcgacaaaccgtaagatcaatccatccaccatctcctgcaaatctcgttgcaacttgcaagcaagaacatcaattgaatctttgttgcttcatctgattaatcaccaggatatggcgattgagcacagcgtagggaggtcgtcgtacgacgcggacacgagccagcaagccatgcagggacgaaggctcaactacaactaaattaaagctgacctgagttttgcactacgactgcaataggcgttactgcaaggctcacttaagcatgatttttatccaatgcttctcctgattaatctgagtaggaagctactgtttgttaatgcagagacagagagccatgttcatgcctacatgttggtgtggttgtaaactagttgtcgatcgtttcttgatcctcctgttgtttgtaaatgacctgacattttaaaactaatcaaaatgctgacagttcatccagaagctcggaaaaagggccaccaaagatctggtcttatacaggttcagccgtcatagctacattatcatctggaccggatttcttctgttcatatctttgagctacacttgtttcctgttaatttatcatgtgcgacatgctgcataatagtactcaactgaatgacgttcagggagtagttaagaagaggacatgccgacgaccatttcctactccatcaacaatcaacaaagactcgtcaatttttaaacgataagtacaaagaagaaaaagactactaccactaaagtctgaactgaattgatcatgaaggactgaaagaacaagtcagctcgtagtgaataatctccactgtagtaaaatacacaggataatctacagaaatagcactgagtctgaaatgatagtacattttaaacagaattactcccttcataaaaaaaaaacttaacttatcagaggatttgacctctattagaacaaatatttgttcagatttattgttaggttgagttttttttggatagagggagtagtagtatacacaaatgtgggggccctgcactgcgacatctcatgacttcacgagagaatcgatcgaatcgaacgcgaacacccgcaattctcatgacgcagcgtgcggcgtgcattcatcatcagtagccttcactgctgtcagagcagagcagggccgcatccatatgagatgatgatccgtcgccgaggcgaaacttccaaacagtggcagccgaggcgtgcccgtacgcgttggatgctagtgctaccgctgcagctgctgctactaggggtaggcgctgttcgggcatggcatgtttgtgtcaggcacctatcatttcagtttcagaagaatctgtccttgcgctccaatcagcagccgccgaggatctcgtgtgtctgtgtctgtgttttccccctctcttgtccttccgtttcgtgcttccattcgcaggccacttcacttcaccgtgatcgtgcgtgaaaagacattaactatccgaaacgtttattagcaaataaaatttgtaagtaaaacttagtactacatatacatacccttaacaactcaaaagcaaatgctactccctccattcaaaaaaaaaaagtctaattctagggatgaatctggacacactctagaattagacttttttttgggactgagggagtataaaataaactatgataaaaacagtatattaaattcaaaattaagtttaaaattcaatgtttttgcttacaagcataagtataagccaatcaatttctttttattccgccgttatatttttctgaaattcctgcttttgaaagtggcatggttattaatactactaatatctaccgttctactggtttgtagatataaatttagataagagcatatcaagatacatagttaaaatctaggagtactatattttttagacggacatagtacaatattatttaactataatttgtttgtaggataccaaatgagccacctatccggtgattaaggttttaaccgtttcctttaaaccattcccaacctaaaacactagacatggtttccataaactccacatcatcaagagactagtactagacaccgttcttccaatgcaaacactaatattccatacttaaatttaatacttcttatctcacatgatgtcttggatgttgtgtagaaaccatgtctcaagacatggtttccttctcttttctcatttatttacatgccacatcatttttcatcctaggtatcaccttatttaatgctatagacacaatcctagtcattgagtcgggaatggccttgtaatcaacgtccccctccaagtcactggagtatattcttgagatgtgatattcacaaccatgtttactagtactactggactactggagtactcatgaatcataagcagggcttctagaaaagtaacaaaacgaatataaatgagtgctctggatgtacttcccgtaggtaatctgtggacgaaacattgacatctcgtgccatcttaactacaccaataatgcatcacgcaagacataccgcatcacgcattataagcagaggagtactgcgcatgcaaccatacgtggtacgacgaagtactcatcatcatgttcatgtacactgggagagataattaaacaccctttttaacctactactaagataggacataggaggatgagtaattcacactcctctctttcttttgtatcatgctggttcatttttaactaacagataaactttttagaacgaaagaagtaatttataaagttatactagataaaatcttgcattagaaatcacagttgaattgttcctctcagctggggcgcattgtactctttgctgcaagtgcactgcatcatcatcataagtcagctcatacacacacacatgagaaggccgtgtctatttattgtagatgcacactgttcacaaactcaattcatacacctccacgaagcaagcagcccattcgggcccacatgtcagcacaggacggcctgcgtacagcatcaccacattgatggaggcgacaccctcttggttggttcttctctctcttgctctcatctcatctcataccatctcatcatcgcttttcctatgtacagcccctttcgccgacctacaaatctatccatttgcaagcaattgtcactctctgcacaacagaagcagagggcccttcgcggctgcgtcccctgttcttcttgttctttttcatgctttccttttactacgtgaaaattaaggatgtcacgctaaaaaaaaatgacccaaatctatcgatgcatgcaaagtagtagtagtgccatccctacaggggccccaaaaataatgaactgggaaagggaaaaggagaagagaagaaaagcacaggttcagaagcaatatactactactggtagcaaagtgagacaaagaataaagagagcaattcatgatttcattcgatcattctcccctcaaaaccaccagagagaaaggatcaggattcaggaagaggaggaggaaaaaataaagttgatttggttcccatttcaagatttgcttgctccaaccattcatgatccatccaatccaatccaatccaccccccacaatttgcagaatccaagaagccagcacagcaaagcatcacaatgttgttttgtcaccatcttctcctcctcctcctgcaactggagcagatggacaccaccacctactactactactacttctactgctccaatgatgattttagaaaataaattaattaagaagaaattgctttcttaacaacccatattatatgatgatcatttggaagaacatgaacttaattggaagaagaagaagaaaaaaaagaagaagaagagattaaagaaaagttgaggaggggaaggggaggagaggagaggagcttaattccaggagcaacagcgacaagagaggggatgatgatgagggtaaatcactaaattgtggtggtggcttgaatacccaaaatggctaggaagagcactcctagatcccacgtctcaatgccaaaccaccgtccatccatggccgagccggatcaacgccggaatcccatcggaattcatcatgacggaggcggtgcgaggggctgcggctgcggctgctgctgctgctgtggcccggcgacgaaccgatgttggagaagctgcgccgccgatggccgccgcgccgggttcttctggaggcagcagctgatgaagctcttgaactccggcgaggcgttgggcggcggcgccggcgagtcggagtagcaaatcgcgcacatgagggcggcccagtctccctgcttgccgagattctccccgagggggaacctgcccatgtagaactcgagaatgctcaggccgaagctccagatgtcgccggcgtagccgtcgtaggcgccgtcgttgaggtcggtgttgatgcgctcggggctcatgtaggcgatggtcccgacggaggagttgcaggggtccatggtctggttgaggatgcggccgacgccgaagtcggcgatcttgacgcggcggccggagtcgatgaggaggttggatggcttgatgtcgcggtggacgatgtggcggcggtggaggtaggcgatcccggagagcacctggcgcgcgacgtcggcgaggaaggcctcggaggcgatgcggcggccctcgagggatcccccgtccatgtactcgagcaggatctggagctcgccggcctgctcgtacatgccgtggcaccgcacgacggccgggtgctcggcggtgcggaggatcgcgatctcgcgcgtgatctgccgccgcacggcgtcgtcgtggttcccgtagagcaccttgagcgcgtacggccgccccgtggggcggtgccgcaccatccacaccgtcccgcccgcgccgctcccgatgcggcggacgcgctccagctccgacagcggcggcggggccggcggcgcggagccgaccgaattcggcggggtgggcacgccgccgagcgaggacgacccggacgacgacgtcgacgacggcgccgacgacggcggcagcggcagcggcagcggcaccgcgagcgacgtgaggtcccgctgcggcagcggcagcgtgagatccggccggcgccgcgacctccccggcgtccccggctgctgctgctgctgctgctgcagccccgcccgcaagctcggcggcccgcccggtcgcatcgcgacggcggcgaggcgcggcgcggcgggttgattggctcgcgtcggcgtgtgcgttttctggtgggctcgcggcgtggagaggacgaggccgatcgggggcagggagaggaagaaggattcgagacagaggagtgtttttttatagacgaggccaagtgaagccgtgatgggggtggcaagaaaattataacttccttttccccctttttcttttctctctggttttacaaatcagacgagtcagtttttgttgtgtttcgtattgccgtgttccaagtgatagttcaacgttttgtggacctcggtaaattttctttttggtgtaaaaaaaactagcaggattcctacgcagattacgcggctagcatcattatattttctcctatataatagcatgtatgttttctcaatctaatatattaaaataacaacataattttaaattttgtactaactttacgaaactactaatgtgtaatatttatattgtattttatatacatgttagttattaattattttttatatcaaattgtagtaatttgtaaattatattcctatacggactctagactcgtctttcaatattttattttcttttattctgaatttttgttctctgtgaattgtatttctatatagactctaggcacttcttctaatattatttatttttaattctgaatttctattatttctaattgtatttctatgtggactctaaactcatctttcaatattctttaatttttaatttcgaatttcagttacttctaaattatattcatatattgactttatattcttcttcccatgtttttttaattttaaattttagttatttgtaaattgtatttttatacgaactctaaactctacttttaattctattatgtttattctgaatagttagttttaaatttctatatggactctattaatattccttatttttaattttgaatttctataatttcttaattgtatttctatatggactctatactctatttctaatattccttatttttaattctgattttctattatttcttaatagtatggactctatactattcttctaatactcttaattttttaattccgaatttcagttatttataaattgtatttatatatggactctagtctcctcttccaatattccttatttttttaatttcgaatttcaactatttctaaattgtatttctatatggactctgtttttcttttttcttcaattaatgtaagaatttctaggccgtgagagcgaacgtggatgatcctttttctattcctttaataagttaatagataattgggtgaggttacttttagttgcgattggcgccaacttttaaacatagcgtcatgagaaagtatacgtgtagttattaaatacactactatcatataaaaacactctgaaaacggctacgacacattattaacggtgtaacatttattggtcttatttgccatggtgcctctgtgttggttttattatgactagcccttgaaaatcatgatttagctcgtgtccggtgtcataagataacatcacctagaatgcaaaattgaaatgttggtttgaattagaaaaatgcatacatgtttatgtgcatttataaaaggtattcttcctatcatacttatttcctgttaataattttatagctaatttgagaatccaacaattcttactattagaagataaaaatgtgagtaaattccaccataattaggatgaaagttctaatgctctgctttcatgccccagcagtttaaaaagagttacacctaagttgatgtactgggctgttttagttagaaaatatttccgtgtctaacttccagccttctagataagcaagtggtgtccatgcatgattcgattgttgatttcttgaaaaaaaaacaaacagattaaaatgtaagtgtaaccacctatgccctcttgttcacatgccatgcatatcaggtgggtattagattatagaactggaaggcagagcatttgatttgagaagccaccggtgatcttccagaatttttatatgatcatcatggttgttaggcttaacggtttctactacctagttcaattggtcaaatccatttctaatgtcttcatatttgaaaacacacgataaggaaaccagtccagataagagtactatacagggaaattaattagaaaagctgagtgtaaacagaatccaccagctagatttgggtgtataaaaacaccaggaaataattaaacgtacagtagttagctactgaacccactattagagcaggtataatagcaggctattagacaactataaatatattttaatgatataaacgataagagagaagagcagcgggctccaagacacactgtgtgtatgacaggtgggaccatatatttatagtatagtaagcaattattgtataaattggttatagatgaattggagctagtagtgggctgtactactagacttgctctcatgagagctttttggccgttgatcaccggccagaggaaataatttgcagtatcacattggtgcatcagttgttgtaaatcccaattgaattttaaattatcagcgttttcgttacatatttgtcctttatcatatgaaagacgaatatgcaccacacacttaatacacttggttatccacgaggcggtgagcatgcagctttaaacacatactactcgataaacattttagtgacaaatttatgatctaattaaatttcttcactacaaaacattacatgaatttattatggctcgaatcatggcttacattaccgttttcaaggtgaaattcggtcctatcaatttaccaaaaccaaaggaaaaaaatcgatgactttccatcaactttgtatgaaaactaactaaaataatctatcggaattacgaaccttggttccagttagccctagtttggtactaaaatgccatgtcgaaacatgtttcccctcccctaaaaatagacaaaaagaaacatgtttagcctcaaattaaacaacgcaaaacagctaaaatgagagttaagcatgtttgagacatgtttgaatcaaaatcttcaaaaaaaacatgtttgaatcaacactggtaattaacaaatcttgttggttaagctaatgattgttcctagtcaggcgtgccgcaggaggacagcaacaacaccacttcgccgtcgcggtttctcccctgcgagtctgcgacgcacagggtcactgacagccgcgcgcagtcgccctgatcctcgggcccacacgccagtgtcagcaggtgggccccgctaaaattcttgccagcttgcgtggcagcgaatgtacggcgtgtgggtttgtttttgcgtggcagccgaggaggagggggctacttggggatttcgatgctccgattcacagcgcgatgaacaacgtgagagcgcgccgtaaacaaacggctcaaaaattacgctcaccaacgccctctgccggccccctgccaattgcatcgagattcacaggggggcaataaatatcgtctcatgtggcacgtggatttcggcctctggagcaccgcctcgggattcacatccagcggttttattactgggttcgggaattataccatcgccacaccgtataacgagcacccccggaaattatactattcctacctttaggggtatatttgagaaaaaaaatcatgaaaaatacttaaaacgagataagtttttagcatatgattttctttctttaaaacatgatacaaacatagacgctcacacacttactcttaagaacacacccgcacaccgcacctatcttataaatacatctactagaagactagcaaatataagttccagtgttttttatggatatattatctagcaataaaaaaaattaaccgtaaatacgagcaccttgtataattgattgaatattaattattttaaatttaaaaataatagattatcatgatcttttaaacaatgcttctatattttatgcaatacacatggctttgacagtttgaaaaatattcgtggaaaaacgaaacaattttttcaaacgaacgctgagcatagtgtgaagtactccgtactccaagatgacgtgtcatagagtgtaaaaccaagagggaaaaaaaggataggagtagatgaaacaaggaaagcgaaagacaaaacgaggagcaggaggtagtgcaggtggagtgatgcgtgggggcaaactgaaggggtacaaccaacgcgagcagcgcggctggcggctgctgcctctcgtactcgtcggattctctctcgggtccggaaaaggaggcagcgagagatggacgacgggtgattgatgggacggctgctgccacgctacgccatacgcgcgcgacgccacaaccaaacaacgcctccaatcgcgtcctcttcctcgctcatccgtccgccaattttgcctcgtttctcctctctgcgttgcgtttcacgctcgcaaaccgtcaactagagctagtggcgatcacagaaggagacagcgcgagtgctcactattcaagcgaggttactgtctgtctatcgcgaatgttttgggctgttcttccaacgtgcgatgcgtgtgtaagctttgttgctgagaagtgagaagagatcaatgaacccctgacttgatcaggtcaggattcgcagcaacttttactttacccctatctaatctaacgatattgtcgtctcgttttttcgcttatacttacacttatcagctaaaatttaattttttatcttaaatttagagttaattttaggttttctcatcaaagtttatttttcagttgcttttagatcatcaaaaacacacatataaaaaagttttatttacaaattatttttcgtttgtaaatatgctgtgaaaggataggtctgctaataccccacgctactacacgagtactgctactgcattcctggtggagattggagttcatacgttgattttgacatgtgcaaaaatatcctactcctacttcagttagttaattactactccctctgtttctaaatatttaacaccgttgactttttagcacatgtttgactgttcgtcttatttaaaaacttttgtgaaatatgtaaaaatatacgtatacatataagtatatttaacaataaacaaatgatatgaaaagaattaataattacttaaattttttaaataagacaaacagtcaaacatatttaaaaaaatcaacagcgttaaatatttagaaacggagggagtaatacaacatctacaagtcaatttaacttgtttcctagaagttggccgacgacaacatcacggcgatccggtaagctccatgtcaacgccagcgtgtcgcgcaggacctgccacgtcacgctcgttttcttttctctctcgctggtgggagtcaacgctggctttgccgggtcgacgtggcaggcaggcgtcccggatggacccgaccgggtcgtcccggtccgatccgttgggcatcgcctcgcatcgatcggtcccttcggcgagaatgagatgcattgcaggggttgcgcggctgcttcgtcgggggcttcgccgaaacgcggcgcgcgaccggtcgggttgggtttggttggccgcgcggaagccggcaggaagcagcggcgaccgggtcggggagggggggcttaggcttacgtggcgcgtccacgcactttggctctgcacggatatgcgtgaacgtttcaaagctgacgaggtcgtgtcaccgttagttactcacctacctaactgcctgcctaacatggtttagggcccctttgaatcgtaggattgaaaaaacggaggaataggaaaaacacaggattttggtaggaatgcaagtgtaaaaacagaggattgcaaaacacaggaaaaatataggaatgaccgtttgattagaccacaggaaaaatgcaggaattagatgagagagatagactctgggaaagttttccaagaggttagagtggatgttaaatttcctacgtttttgctctagaattgtaggaatagaaaagtttcctacatttttccttttctcattcctacgaatcaaaggcatgaatagtgtaggatttcaattcctttgtttttcctccattttccctccaattcaaagggggccttagtatcaaattttttcttcaaactttcaacttttctatcacatctaatatttcctacacacataaactttcaacttttctgtcacatcgttccaatttcaaccaaatttctaattttagcgtgaactaaacacacccatggtatggtactaggagtaaggggcgaaacgctcaatggattggacggccaaagatccttggatccgattgatattcagggccggtttggtacagctccaactcctaaatttagctcgaggagttaggtctggagtggagttgtggagctgcctaaacccagctccacaactctagttcattttgtgatagagttccacccaactccactcccagttttggtggagttgaaactgtttggccgagctccagctccaggaggagtggaactggagctggagctatgccaaacaggccctcggtaatgtaatacagctccaacattttgcatttggtgtatcagtcgcgatttaaattttaattctgagtttttatcacagtttttttttcagctcgcttaaagtactgaaaaaattcacccatacaacaaacaatgagctgaaagtctcgtccagtagtactcactcgtctcataataaatttattttttggttcctttaatttgtccaaaataagttcacatttgagtattcactacatcaaagtttatgaaagcatgagagcaccaagagtagataaaaaagtaataattgtattcagatttgataaagtgagtgtactctagtttttttattggtatatgtggaatggataaaaaataaatctattttgagacaaatggagtagttaataagaacatatctatatttatggtgtgtttaatttgagttatcactagttcactactagtcatctcaatgtgtaagggtggaatggtctatcagtagatgagatcatcccttgattttggcagcacggcgtcattgtttattttccattaacaaataagtaacaatacaccaatgtacgtttagagcaggagatgttgatggaccaaccattcaatcaaaaccaaacaagatctcatatctggagttcagatcgattagatggtccattaaccatctcctccacaaaacgaaacacatcctgtggtcaacaagttcgttgactagtactagtataataccggcaaaatccaaaaatagagagattttctatttcttttttggctggtggtggaatgagatgagatgtggacatgagcatgaactgatcaccggcttcatgatcacggccgaaagagagctcgaggccacgactgattgggattcccgagtatatatgtgggctccaaatgatgcagcgatggatcatgacttactactgctggagtcatcaacaatggcgccggtctgtcccacaagatatggagaatttgttgttccaaaaaagaaagaatttgcatatttccttcagaaagatatggagtattttttttttatgtaaggccaacacactgatgcttctgtagatcatttgcatagatgcagcggcaaaggtgctttagaaataaacagggctagcgattctctcgcttttctctaattaattgcctccaacttgtatatgggttttcatggttattgcccctaatcaagtggccatgaggtgatgtaatctggccataccatcactgcttggtttgatgttagctcaagtacgtataaaaatccgtgtgcctagcctagtaagcttgggatttttttgacccgatcttatcaacttcaactcatatcagccaatccgtgccaggcaaactgagaattggatcctggaggggaatgaacatatgtagctatttatatcatcttttgtttcttctgatttattgccctgaaaacgttctatttaccctctgggaaaaacaaaaatgcagttgaaaaaaaattgtagttaaaaagggcatatgggcgcagatgtcatgaagtcatgaagatgagatcgacctactagggctgtttttagatccaaacttctaaattttttatcacatcaacctgtcatacacatacaacttttcagtcacatcgtaccaatttcaacccaaactttcaactttggaaggaacacagcctaattcaattgaatcagcttcagcttctgtaaaaatacaacagtgtgggaatctcctatggaagtcagtcagtatgtactagcacgcggccggcttggagcaaaaccaacggcagaaattaaatccaaataccaaaccagtgacttctgggcaatatatggtcatcttttcacatgaaacctacaccacagagcagccaaaaatatgatttgcaattgccaacggtgcttctgtgcgagtggcatttcatctggcatacaagaatgttgttagctcatggtgctactcgagctaatggataaaatgggctataaacaaagatctggtacttgcttttggagctgataagatcttcaattctattggttagtggcagggaaatggatcgctttcggcatatgtaaattatgcatatctttcgatgtcaatgaactcccctacctgattcatcacttgttttttttgggagattagattcacaatttttgaaggacccaccatagttgaaaaaacgctaaaaatctccagattgaagagctcgctttccatgctgccctgaaggaaaaagggaacattgctttcttttatcctttcctcagcgcgtgccatttttctttgcagcttcacatttgacattgtggaagaaaacaacaagaaagcaacgtagatgtaactgtcatggtcataattccagctagtgggatcgaaaaaaggttttcgtgccgacgtggatgagtgatgaaggccccgaggctgtcatcacgggtgcgtcatctataccacatactacaccacactaccagcagtaacagtaatcttcttctcctcctctcgacatacaggagcagttacggattgatcaatcctatccattgcttttgtatatgtactacatcgatccagcgtgtagcagcacggcaccttcttccatctccaagaaagtcggaggaagcacggcagaaggagcaccgcatctgtataggtctacatttagaatggtcctgtagtaaagcactcattgctgtaggagcagataaaggagccgtttaggaagcttaagattttaggaagaagctggctggctggctttgaaagccggtttttgagaatctgaaaaaagtgggtttcccaacttattgcttctaatttattttctagattctataattataattttttataattataattttttagaatcttgatcaaaagctgaactatttttagagagcttttattctcagggccaaagattctcgaagcatttaacgctagctagctaaggcaggtgcgcatcacggtcaccggttgccgctcggcgaatccgcaatcgcgcgacgcttgacagcacacaccgtgtcatggcgaacgagcggtgcatggctagctgcacgctgcagggttgcaaccggctgcggaaacgcgcgcggacctacgcgtcgtcgtgcgccgtgcgccccggccgtcgatcgttttcgcggcggcagcgaaagccgaaaggccggcccgcgcgcgagacaccggccgcgatgccccatcagcgtcagcaggggcacgtctcccgcccggatgggggttgtggccacgcgcgcgcgctgcggctagcaatattgggtgtgttttcactctaaaattgaaatgaaagtttaattgaaattaaaataatataataaaaaagttaaaagtttatatgatgtgtaggaaagctttaatgtgataaaaaaattaaaagtttaaagaaaaagttaggaactaaattagaccgttgttttttcttttgttgggctcgtggcgaaacacgagagacggcgacggcgtcacgcagcgcacggtggcgggatagcggaaccagcgacgacgacgtacacgcgcgcttctatctgtttatcggccgggaggcaggcaccttttcggattcaatgctcgcaataaaacggacaccggtgtcgtctggctggatggatggcttactcactgtttgttgcctgcgatccacggctgtttcggctgtcacgtttccaacgctccttgacgctagtacgcaaccttttggcgccgtctttctccgggatcagtcgacgtgccgataacctgtccgaacgtaccgtccgtccgtcgccagcgtgcatgtatgtatccaggtacggaaaatggcagctcgttttgttgccttgtcacacttgctgccggacggggattgatggggaactgggcaggatggggtgccagatagtgaggaatcgttgtcggcaaggttcagcgaatggaactgcatgctgatatatacgtatacgtatagggagcatggttggaaactgttttaacagctcgagtggatgtccacccatttattgcatgttatctaaatggttatgaaaaaaattgaaaaaatatgaataagatagatcaatatgtaatgtatcaatccacaaacatgcaagttaaaattcaacttctacatattgtaacaaaaaataacaaacaaaactcaaattactatatgtatatttacacttaaatttgttatttttgttacgacttgtacaagtagaattttaacttgcatgtttgtagagtgatatattacatattgatctatcttgtcaatttttttaaaaaattttttgcaaccatctagttgacatgcaataaacaggtggacattcactcgagctattagaatccatctccagcatggttcaattatttgggttcattcaaatggacgtgtttatcccgattcaagtcttaaacttaatatggatgtttgcgtattggtttagttatcctttaagtgataaatgactcgttcgtcgatatatgggtgggtatgcataggtttagttatcctttaagtgataaatgacttgttcgtcgatatatgggtgggtatgcgtacgttgtaattatggtgtatgtaatatatttctaaaaaaaaagcaaaaagaatcagagctgcactaccagacggtactactactcccagctgagtaaaccgaacaacatcacgtgggaataatcgttatgcatgctctcttgtctgcacggctcgatcgtggaatcaacaaattctgatgaatgcattgaattccaggcacgaggaaagtagcatcaggggagtccagtgaactccaaattgcaatgagcacgagcggaattctacgggtcatcaggcgagttcagtaaactccaataacgcaaagagcacgagcggaattttacgggtcaggcgagttcagtgaactaaaaaacgcaatgagcacgagctgaattctactggtctgggagatagtactccagtagataatgacgctaaagatgcagggtaattccattttcatgccagccctggctgatgcgacaggctctatgtgctgggccagggggccctcttctactactaggccaacgcgtcaaaagcttcgttgagcatatggcccttgcgtctgcataagtggagtagagtatatgtcctagtgtcccaacatgagcgaacaaatccagccggacttcgtctccgatgcagcatctgtctcaaacatgtcgcctgcatctaacctgttggtgtcctgccttttaggtacaagctgttggcgaaaacagcaaatgaatggacaaaagccaagctaaacaaaggtgttcaatgaaccaagttaaacagcttagccatgaaaaccgcaggaagctcggtggttttcgctatgggcatcatccgacaggtctcttcttctgctctgctgctgttgcctgcaaggccaaacgacactgatacagtgatgctgtaatactacagctgacaagagttcctgcaatcctgcagatgatacactgaatttaacaggtattccacttgtttctgcagaatgctgtaagtgcaggtcatgccagctcgaaaagtgttacggagaagtattactatcctgtaatctagagcacgtgaaaaccgtgaccaaactgtccccgaaattgaatggaacagggcactcgagcagggtaaaattcgtgatcacatccaagacgagcattactgaagagctcgtgcaacacgttgtgaagcaagtgtagtataaagatgggccgtgtaatttgttgggccgaggagatagacaagacgagcattcctgaaaggaataagttcactttaggtccctcaatttgtcgctgaatttgaaattcgtcccgtaatactagctgccacgtcagccaaaactgagaggaatattgcattgggaccaaatgtgacccgatttttaagctgagagacaagttatatctagtagtattgtggtttagggatgaatttcaaattgagcgataaaacgagaacttagggcttgttcactttgatgccattttcaaccttatcaaattttggtaaagttgccaaaaaagtggctatatttagtttgctgccaaattttggtaactatataagaaatcctgctaaaattttggcaagttgccaaaatttcggcaactatgccttaccaaaatttggtaagatttattttggcatcaaagtgaacaggcccttgttccttacggaagaactcgtgcaacacgtcgtgaagcaagtgtagatgggccgtgtaattggttgggccgaggagaaagatgggcctgcgaagaggcaatgtggaccatacggtggttggtgggtgaacctcgtgtggtgggtggttcagggggctcgttttcagtcacggtcgcggatccggcccgacccggcccatattccgtctccccatatcccccactgctttgcgggaggacgaagcgatccccaatcggccaatcgcgagagggtgaagaccccttcgttgctcacctcgtcaccaaccaaccccaccccccaaccctctctctccctctcggcctctccgcttctccgcccacctcacctcgccgccgccgccgccgtcgccgccgcggcgcaggcagcggagctcggcgcgcctcggccgcgccgtcgtctaccgtgcgggcgccgctcccgcgtcgcgcctcgcgcgcgcgcgcgagcgcgagctaccctcctctctgtgcatctggcgacgactcggtaaggttagggttgtgcgccgcccatgcgcgcggctccctcgtcgccactgcctcccgctcgccgtgtcctctgccacgggcgcgggtaccctcccatccggcggagttgggagtcgtgcctagggggaatctcagctgtcgggccaccgatctaccctccacggtgttgctctaagtccgtggtaaatatctgcgccccaaatcctttcgactgtgatatttgcttacgcggatcggctgacctgagtgggttcgtgtgtttatatatggtttggattcgccagatctgcgattgctctgaatttttaccttaaatgtagcacaactcacgtttacggtaatattcccaaatgtgcttctgcgcaatgcctcaatatcatgtgaaagtgggacctagatagtaggggggaatgactttttgtggctgtgcttgttaggggatcgatctgtggtttgttcatgttaggggaacttcatccggtttttggttttatgcatactgttatgtcttagttttcagggtttaagtggtaatgacaaacactattctgtaaaatcaatatatattttctatgcattcatcaattaggagttgtccgttttgactattgttggccttcattacaacaccaacggtgagaaagtaagggttctttggaatgtgaattgctgaaaattccttggaaaagagagaaataatgtgcgtgtgtacggatatggattgcctaaacttggtgtcaaattttgttggtagtggtgttttgtgatataatcccagtttggttgtttcagtactggtaaaaatagatcaggacttggattttggtctttcaggaactggatgcaaacctcagcctggtatctgaatgtgttaggtcaggttgtgtcatactgcaatgtgttttcagtagggtggattagtttactctcccttctctgaatgctattatacttttacaaactttggtgcttcttctctcttcactgatatatcttacccttggtgctatcatgcttgttttgcatatccatactacgagtgatgtcctgttctttgcctgccaaacgcctttggtattaatttaaggcatgtttttccaaacattggctatgaatgaccttggtcattatggatcattggatcctatgagaggtgaatgatattgtttctatatgatgtaccgtgctgtggttattgtagtgttgattttgacatcaggccttcagatctgttgaatattccacctattgcatctctagagtctaaactgtgggatatgttcttacgtgctatgataagatacaatacaacacatgtattgtattgaaccttgcatcctgattttacactctatgttctggttcctaatttagcctagcctgttttttatactttggtataactttcacctggtaaagttgtgtgtcagctgtggtttgctgttaatcaggtataacccagaaagtggaaacatgtgtgaatagacagctgctagctttgcctgcatggtggtctctacactttataatttagacaaacttaaatattactaaattaggcaaacctgcatactgcgcatacatgttctgtcaaagtttattatttttcttctatgcgttgtgacctgtccatctatgtactgtatggatattattatgcttgagaggaggtaggtatgctttaatatccactgctgtttcttttacgcgtgttagtattctgaaaagggcaaaaacaatgtccaaagccccatgattacataaacggggacaggtttgtgatgtttgatcacctttaaaatgcatcataatttcaacttgttgaacatacagattacctgctttcttcatttccgtgttcagcagctttgcaataatttctatgttcatttctagtcgtcttaatgtttatttgaaaatttattttccttctatgtgcgaaattgatgttttttttactgtgttctcttgcagaatagctctctttgtgatataaatctaaatgttcacttgaagctggaagtctctgctgaagcgtagaatcgtagataattcctgcactcagttttgagaaaactggaggtctcagaaatttagcagcttgcttctttctttgttgcatctaagaattgatgacctcagccttcaacgttacttgaaattcaaggtcataccgatatgcacgcttcgaggatggaacaaactacaggtgttagtggccatgagcacataattgatattccaagggacagtggtccatctacttcgacttcccatagtgttgctagagaaaaccatggagaaccaaatcctgttgatagatctgcaaccagagcgctagtacctgctttgcaggcaccatcagcagttggtgcacctagtgcaggacatacttcaggtgctagaagaagtgataactatgttcgccggcacagaagccctttgaattctggactctggatttcaatagaagttcttgtcaatgtgagccaaattgtagctgctattgttgtgctttctctttcaagaaaggaacatccgcaagctccattatttgagtgggtcataggttatacagttggttgttttgctacactaccccatctttattggcgctatatacaccgcaatattgtcaatggtgaaaatgagccagcacatacacttcaaggctcctctcagaacaattcaactgagccttctgctagtgcatcagagcgtcgaaggaatgctgcacgaaatgcagtgctcgctaatccaaggtactttgttgtgcatcttttgcattaaaattgctattgtgagatcttgcctgtatataagtgattcttctttagttctatggctaggcttgccgagtcgtgttgttggcctaggaaaatgttacaagatatcaactaggctagatatgttttagtgcatgtctgaagcatctgtgtatgagcattgcaaggaacactattgtttagattgttatttacacatgttcacaatgttgctatttaaagacaaatgccttttcaggattaatgctctttttgaccacttcaagatggccttggattgtttctttgctgtgtggtttgtcgtaggaaatgtgtggatatttggcgggcgttcttctgctgccgatgctccaaacttgtacaggtaaatacaaatattttttgtgtggataagatgctcccttgatcttgttgctgacttttttccctgccaggttatgtattgtgttccttacctttagttgtattgggtatgccatgcctttcatcctctgtgcaatgatatgctgctgcctgccctgcatcatatctgttatgggatttagagaagatacaaacaatacaagaggggctacctcagaatccatcaattctcttccaacatacaaattcaaaaccaagaaacgccgtcatagttcaggaaatgaagctgaaggccaagatggtgggatagtagctgcagggactgacaaggagcggtcactatctgctgaggatgctgtatgcccccctcctctcactttttttttttcatctgttggcagcaaaccaactatttcatatcgtagttatttattgtgcctgtaccctttgattttgcaggtttgttgcatctgtcttgcaaagtatgcacacaatgatgagcttcgtgaacttccctgcacacattgtttccacaaggaatgtgttgataaatggctgaagattaatgcactttgcccattgtgcaaatctgagatagcgagctcatctggaacatctgatactcgtcgctctgaccacacagatattcctgtgcaggagattgaaatgcattagggtgatctgctttctgaggtaatacggcagaatacagttacttgtggtgaccgtgtgcttgtataaagttcaagctttgatatgtggattgtaatgatgcatggggttatttttgttgctgttattttggagaagacagttctcactgtcaacatacacgaggaaatatacaatatctactcgttccatcagagtagtaccctgtgttctgtggagtttgcactagagtactgctactttctagtggaaaagaagtcgaccaggccaatatatctggatgacttcagcaagctttcctattgtactacgcttgcagaaatggcaataactgaaattagaggtggatattgctatcaaaagtggtacgtgcctttgataactgattcgctcattcgtaactcatttgacgatgttgcatgtattctgcactagataacttgataacctgaagaaagtatatcgtttgtaaactttccgataccttccgatatgtgcgttctgacgtcagattatgagagttttgggcttttatcgtactatgttgtgtggtttctcgtcgttcaattctgaaacctgccctataatacttaaaatccatgtacctgttcatcttgcgcacgtatttctgagacaatgggctagttgtttctttccttttcatccgcatccgctggagaagccacgtctatctccgaatctctggagccactcgttggactcgcggctgcagcggtgaagctgcgcatggcctcttgtttcttccgtccactgtgcatctgactcgtgctgccgtttctcattgtttcgtcgccatgcctcttgaaggttggagtacctcttgcccttcctgttactgtcgtagtgctgcagccacccgcgcttccgccacagagacatgctcccgccgccggactccgccgacctaagctcgtcgcgctcccggtacacgaacgacgatgagcatgacgcccgacagcacgccggtaacgaggaacagcccgccgaagctccagaaactgaggctagacgagccgacgccgctgctgctgctctgcttgactgcttgtcacattaccctgcttatagctccggcgtgtactgctccggtccgcgcgtgcttatagctcctctgctttactctcttcgtggaatttctgatgagcagaggaaagcattgccaccgcgcatccgcatcgcatacttccgctacgtatgcctcctcaatcctcattctcggccgtgcgtgttgtctctacgacactaccggtctaccgcgtacgttacactatgcgatgcggatgcgcggtggcctcaagggcggccctgctgcttccagttgggccggatgttgcggtctcagctgagaagaggaataagtgtctatttgcccttcctcaactcatgtctttggttgaatcgcatcccttaaccataaaaccgggtataacccgttttctaactcccaaaaccgttgcaaaacgactcactagatggttgttaatcttagccttatagtcaccttcggcccgctcatgatttgtttacaactgctgatctttttttttcatgaaattgagttttatattaaaatggtgaagaaatatttacatgcttccaagaggatgcaaaaggaaaatactactccctccgtccgaaaatataagcacttttagcatatggcaagtcaaacattttcaactttaactattaatagaaaaaaataaaaaagatcaatcatgtaagattgatgttactagatttatcattaaacaaattattataatatataactctttttatttaaaacatcttaattttatagacattgttgatcaaaatagtatttcggagaccgtgtcagagtccaaaaatatttatattttgcgacggagggagtacaaataagtacaccctccgtctaaaaaaggcaatctagcaagtacaacgaatctaaatatattttatgtctagatttgttatattaggatgtgtcacgtcgtactatgaggttgagttttttttgttttgacggaaggactgtttgaccgttagtttgccgggtggaggcgtgcagccggatcgttcagtatgctcctgtagtcctgtcatcctgtgagtacaactattacaagtactagtgatttttacatggaaattcatccaggactccagactgtcgtcccattttgaagtgtcacggtgttacctgtactcttggaccatttatgctcccatcaacaagaagcaacttggtcttgtcagctcaacactccacctccaggtattactggtgcagatttcaactctgctcgtagggtagcctcgccttgtttctctgtcatactattgttgggtttgagttgcagtagtaggccagcataaaaccagcgaaattatgcttgctccttaaacatttgttaatgtaatttaggacactaatgggatgattccattcatttacaccctcttatacggcgtggaacggaacagtattctcgtactctgattctataggaggactgcaacgactcgcgtgctgacgacgcatccgctgcaataataaataacgtgctttgctgccgatgactgctctcagctggtcggctcaagacccggttcagtttagtgccctcccagcaagttggtctcgacatcgatcataagagacttcatgcagctaaacggtatatttcatgtgaaaattttatatatagaagttatttttaaaatatcaaataaatattttttaagtttataataattaaaacttaattaattacgcgctaataacttttatgtttttaatgtcctaacttcatcttcaacttcattagaaatgatgcaaaaaaacatggacgtgactacacagctagtgatagctggtttgtctaaaccaactatcacttcatctataagagacaccatccacctatacttcaaatacaattttctcttaaactactcattcaatctacgatccgattacaccgttatgtccataacaattaaatctttacatcaagatctcacatgattatattttgatgaaaaatcataaactacttttatgatatgtctaaattacctttagattttactaagttacttcttatacatacaaaagtaaattcagtaaagcttaaaagtaatttacatatattatagaagtaacttataaaaaaaagatagaaagtaactttgattaataccttttttcattgaacaaattatcatatatttaattatcatatatataagttacttttagatttgattaaaatatttcctatacattcataatgctctgaggtgattacttttattattgtttttagttaattccataatttgtgctgattaatttaatttctagatagagtcatgtttttatctctataacggatttacttcaaatgacatgtcaaagttacattcgttttgttctaagttacttctataatatatgtaaattacttttaggctttactgaattaacttttgtatgtctaagaagtaacttagtgaaatctaaaagtaatttaaacatatcataaaagtaatttgtgatttttcatcaaaatataatcatatgagatcttgttgtaaagatttaattgttacgaacacaacgatgtaatcggattatagatcggataagtaatttaatagaaaatttcataagaagaaaaaaaatatgcacaacctaatagcaaaaactacttgcatgcatgtacgctaatagtacttctcacgtaattgtctgcgtcgctcgttaagtctaaatcgagatgcctctcgaaatagattttgcgaaaaaacatctaatgttctcctcgtagaaaatagcattaatggaaattaccatgcaaagctcggtgcccttgatggatcactggatcctgagttcctgactcaattcgtactatatactctaacaccaaattctctgcagcgaacgataaattgcgaaacagtaaaaaatacagaaggtacgtgttagttctttgggtgtaaagtttttgaagtatacgcatacacatttgaagcattaaacgtagtctgataacaaaacaaattacagattacacatgtaaactgcgagacgaatttattaagcctaattaatccgtcattagcaaatatttactgtagcatcacattgtcaaatcatggtgtaattaggctcaaaagatttatttcgcaatttacatacaaactgtgcaattggtttttttctacatttaatgccccatatatgtgttgaaacatttgatgtgacgtttttggctaaaattttttgggatctaaacaaggccagagtttggcgccaacctgccagggtagctttcaggtattgtactaggttcagagtttggtgtgtttagttcgcgaaaagaaaatttttaggtgtcacatcggacgtttgaccggatgtcggaaggggtttttggacacgaatgaaaaaactaatttcataactcacctggaaaccgcgagatgaatttattaagcctaattaatccgtcactagcacatgtgggttactgtagcacttatggttaatcatggactaattaggcttaaaaagattcgtctcgcgatttccatgtaaactgtgcaattaattttttaatgtatctatatttaatgcttcatgtatatgttcaaagattcgttgtgacgtttttgggaactaaacaaggccaaagtagctaggggtggacaaaaagctcaaaactcgtggctcggatcgattcaaacttgtactcttaatgagtcaagttgagctagcattttagctcgcgagcttcttgtttggctcgttagtataaaatatcatcatatcttcatgaacttagtatttcttgactagtgcttagtcttttaattacatcaaaactattcatatttagtgagtattatattagttagtgtttattattatgttaatacataataaaatgttaaatttgtaattattaatatgatattaatgagatataactcgttaacgagcctaatgagccagctcgcgagccaagccgagctagccttttagctcattaacattaacgagccgagccaagttggctcgttaagacaacgagctcaaacgagccgagctggctcgttatccacccctaagagtagctgtgtttagttcccttcaaactttcaaaaattacatcacatcaaatgtttagacacatgcatgaagcattaaatgtggacgaaaaaaacaattgcacagtttgcatgtaaattatgagacgaatcttttgagcctaattacgccatgatttgacaacgtgatgctacagtaaacatttgctaatgacggattaattaggcttaatagattcgtttcgtagtttacaggcggaatctgtaatttgtttttgttattagtttacgtttaatacttcaaatatgtgtccgtatacttaaaaaaaattgaaattgaactaaacacggcctagatcatttcaagatgacgatatcagaattcacaggaagggaatacggtggaaactactgcaggcacaacaactgcgacagtttgttcgcctgtcttacttggagactgatgtgactgaccacatggagaatacttaaaccagactagaatgacggatctgtttttgccagatgaattcaaagatcagtagtctctttctctgaaggaaatgctgggaaattgcagcaggcagactgaagtatgcctcaactttgtcttattttggtatgctctccagaaaattctttcaatattcaccgcatttctatcgcgtacacacaagtgatgactgaccaacattgtttgatcattcacggttttgtaagattatgccatagtcagaaatgatgaagattgctttgaatgtgactcacaaggtcaagatcttacacgaatgggcaactaacaaccgtgaaaatatactatcctaccaaagctgactttgcgcataaaagtctgtttctttttattacaggtagatctatgaatagtatatttcccagcataagtggcaatggcattgacattgcaactcaactatatatattaatttcccagtagcatgaacgtctaagacgttgagattacaattgctagtagagtatctgtttatgtgagtggtaagcgtccctaataggcaaactaattactttctttagaagcaagggagttagatctaattgaaaaatcattggaacaaagtttgacattactgtgtttaacttgtggttgacaactgaaggaaatatcagctgttcctttccacggttccacttttcatttcggtaccacgttgcttggtgttctttcatcattttttatcactatcataatttccaaaaataaatatgttcactgctcggttcacagtactatttacataaattttaccatccttaaaagttattaagagatatcaaactttacactaggaaatatattttcttttgataccttctcaaaactgtaaaatcactttaaaattaaattttagagggagatgcctcatgaattgatacagaggccggatattaaaatgtaatatttcatatctaaaaagatggcattctgagttgtgacctgcattagccgcttacattaagaggaagcttacagatctaatgctccattattatgtcctagatttcttttttttagaactatgtcctagatttccaagcgaccgggtaggtatacacattaaaatgttctgttagatcgaaatttccaactaccataaaaaaagttttcttctcagcagactgtgtagaatattcagatgctcgttccattttagagcggaagattctgtctgcttttcttgactttttgcaataagacatcctcttcagagcaaggtaatcaaggactcaaggtcttcatagcaaggtacaggcagcattgttccaatacttctgtaatcggaactcacaagccaagggcacgtttgatctagattatggaacggattattactacggattatttatttattatattagggtaagttaaatattttgagaaaaaaaaacattgacaaataaccaatgcacgcatgaagcgaataattcaatgagactaagctaagaataacagagccaaggaagagagaactggaattctgcacgtttgagagctcaaaatccatgcccacattgtcaaacatacacctgttccaaagcgcgtacccactgatggcaactgttaaactagctccaattgttttgtagcccatcagctcgtcattgtaaaatcgcagcatattacttacagtttacagcacatatcatctggtgtaggcattaactgcaactcgagtcattttcttcttctcaatcagagtcaactgaccaacacataagcccagaccaaataaagattaagaagtatagacaaagaggaaaaagaaatgattaacatcaccattggcttcggtaatcggtagctcggtcgctgagttttccccgtacagaccatatgtcccgcgacctcgagtcctcctttccaccgacccttccgaccggttcttccggtgccacgcactcaccgagcagcgcagcaaggtcaagtcaacaatgcaagcgacggaaaagtcccgtattatttttagaaacacaaacacagcacttataacacacactcacctatataaacacagcccccccccctatcagcatatcttgaaattgacgaagttaccacgagcatttcgtcgaggctagggtgacatatcttaagattgatgaagtcaccacgaacgcctcgctgtcgacgagtacgttttctaccccactgaaagaataattatatgcgcatatatttatattaacgaattcatcataggtatctcattgagactagaccgacatattttgagattgacaaagttatcatggatgtcttgctgtcgacgggtatatcgtttattactgaaaaaataattagcattcgtgtcaaatttagaacttaatcggatggactagttgaaaaaaaaactatcccgtaaaatttttatccgtatataaagctactgccgcgttggactgcggcggcagcgcacggcgagagccagaaaaatctgcaactgctagtgcgagtgcaagtggtggttgctgagagcctgatattgtgatgcgggtgtagatggcgaggcggtcctgcttcttcttcctcctcccgctcctggttgcggcgctcgcggggagcccggtggtcacggcccagcggaatgcgctgccggcggcggcggcggcggcggcgagcgtccgggtcggggtgatcctgaacttgacgtcggcggtcggggtgaggcggcgggtcggcatccagatggcggtggaggactactacgccgcgaaccccgggtcggcgacgagggtggagctccatttcagggactcggccggggacgtcctccccgccgcttccgccggtaagctcgccgcctctcccattccttgctcgaactaatcaactaactaatgatgcttagactactactagtactaatttattacgacgcctagtttgtttgacggcttgaatggatagttcgcagcgatttcctagaatcaattgctgatggcctgattagctatgctctgctctgctcatatgtgggtgaatttgcacaaaacgtcgaaaatatctgcaaatttaaggagtttttttgttcgttttatatagtcgcgtgtgggtttgagtcctttgtaatccgagccagtagatgttgttcgtacgtatatgtctacatcgcatgatgcataagcatcttgatgcagatgatgcaaaaaaaaaaaaaaagcttcatagctgccattgtcatgttgtattgtcaactgtgctcctgaaattatgtagatatgtacgttcttttgtttggctgtcgctgatactcccttctatcataatagtttctcttgaaaacgttgaattaaaacccttattaagcttttgcaatgatatgctcgcatgcaaagggtcttgttgtcttccttgatgctgacccaactgatgttgtcaagagaatatgccaccttgtcttcaaatcaacgccggaacaggaggacagattagacattaattaattgtttttggtaatcccatttctgtattaggatctcagctaatcagtcttatattgttctgacatttctaacctcgaatccactagtcatagacccccaactctcacgtacaattgtactccctccgtttcaaaatgtttgacaccgttgactttttagcacatgtttgaccgttcgtcttattcaaaaaattttgtgaaatttgtaaaactatatgtgtacatgaaagtgtatagttaacaatgaatcaaatgatatgaaaataataaataattacttaaattttttgaataagacgaatggtcaaatacatactaaaaagtcaacggtgtcaaatattttgaaacggagggagtatatactatcagttttgtcagagtagatacgtgtctatatgagatatgcttgtttagagacctccattgctacttgtctacaatatgctacagctccatgcatgatgcatgtcgccttctaatttgtttaatcacttcgagttggactagtagtcatctctacccattaaaatcacgatggcacgtaccaacgatttggtccggtttatggtgttcaaaccaggcttgatttgagtcaagtgtcaagtacacgaaatcttgatgcttgaattgtttagctggtcacaagttctatataaagtcttcctcgaaataaattgtctcgtcacaaaatgtcagtggccatgaaggacatgacgattatattaataaaatttaaggatgcgaagaggacgttttaaaatgtcaatccctttcgttgctgacctaaaactctcgcatacgtccttaagttgtaaaactgaatctaatttccgaatgtaagcagataattctaaccaagtaacttcgatcagctgacaacgatattgagaagattttagctgaagatgcagacgtctgtgtgagtatgtgtagtgtagggataagagaaacctgtgccatttgcgcgttttgcgcgatcggatttggacgacgtggagttctgaattttccaaagcgtgtggagtgaggccattggctccagcatagaccatagacttactgtagagatggtcaagtgcagtttttaatggccctgaaaaaatgccataatttgtatagatatacaaggtccttttcagtttgtgacaagtcgttcttttgtctattagtatcacatgtcagcacccagcagtagcattcatgaaaactgtgtagtgtacactgtaccattgcttctactgtactcctaagttctaactggagtagaattatctggtagggtaatattatgagtcatcgtatgatcaagactgccaattgtgttagtgtataattatctggtagggtaatattagtgtagactgtgtattatcaggaggactgaaggaacaaaatagaatcgtagttgcagtccagtcaccccagactctgctttgcacctaagctactccctccgtcccataatataagagattttgagtttttgcttgcactatttgaccacttgtcttattcaaaaaaaatttagaattattatttatttattttgacttactttattatctaaagtactataaacataacttttcgttttttatatttgcacaatttttttgaataagacgagtggtcaaacaatacaaacaaaaactcaaaatcccttatattatagaacggagggagtaccatttttgcctgatctggtctaaatctgggtcaaggaacgtctcaccgaaagaagaacctggtgttctttctttaggttttgatgcccaatatctgttcataccaatttgttcaaatcaagcatcgaaccccactgaatagttgcttttgttttgattcttctgttatgtagagttgttcatcttttaagattttttttttaaaaaaagaaagccatatcaatgaaatgatctaatttcgaaaaaataactgattagaatgctagaaatgacttgacttcgcaccagtaatcaataataagtgatatgcatcaagttgattaatgatgcaataaacggtatcaaaactcttttcacaattgatagtctcaagaactgtcagattagaagctgaaataactgtcagatcaacaactttcataattgatagtctcaactgcgaaattcttggctccaatttctgagcggctgctcgttgttgttgctgtcgttgcagcggtggacctgatcaagaatgtgcaggtgcaggccatgatcgggccaccgagctcggcagcgaccgagttcgtcgcccacatcggcagccactcccgcgtccccgtgctgtcctactccgccacctcgccgtcgctgtcccccgcgcagacgccgttcttcgtgcgcgccgccgtcaacgactccttccaggccgcgcccgtcgccgccgtcctcgacgccttccgctggcgcgccgcggccgtcgtgtacgaggactcgccgtacgggagcggcatcctcccggcgctcgccgacgcgctgcagggcgccggcgccaagatcatggaccgcacggcggtgcccgtcgacgccaccgacgaccgcctcgacgcgctgctgtaccgcctcagggcgatgccgacgcgcgtgttcgtcgtgcacatgctccacaacgtcgccgggaggctgttccgccgcgcgaagatgctcggcatgatgtccgacggctacatctgggtggccaccgacggcgtcgccacgttcatggacaggttctccccggaggaggtcgacgcgatgcagggcgtggtcagcctccggccgtacgtgcaggagaccgacgccgtcaagaacttctcggcgcggttcaaggcgaggctacgccgggatcaccccaccgtcgacgatgtccgtgagccgaccgtcctgaggttctgggcgtacgacacggcgtgggcgatcgccgcggcggcggagtcggccggtgtcgccggcccggcgttccagacaccgcagacgagcgcgccactgacggacctggaccggctcggcgtgtcggccaccggcacggcgctcctcaacgccgtcctgagcacgacgttcgacgggctcgccggcaagttcaggctcgtcgacgggcagctccagccgccggcgtacgaggtcgtgaacatcatcggcaagggcgccaggacggtcgggttctggacgccggagttcgggatcacgcaagacctgaacgccggcagcgccaagacgctgaggcaaatcctctggcccggcgagccgcgcgacacgccgagaggctggaccgtgtcgccgagcgggctgccgctccgtgtcagcgtgccgacgaagcggggcttcacgcagttcgtcgacgtcggcaacgtcacggcgaccgggcggcgaaacatcaccggctactgcatcgacgtgttcgacgaggtcatgaagattatgccctatccggtgagctacgtgtacgacccttaccccgatagcccggaatcttacgagaagctcgtcgaccaggtgtcgtcacaggtcagtacatgccaaagttcaagagttcttgagacaatctgttcgtttgatttgttcgatcagagggacgtggattttcacccactcgttgtttacatattatctaaatagttagcaattttttttaaaaaaaatgataacatggatgaatatgaaatatatcactccacaaacatgcaatatcaaattcgatttttgttagttgaaaaaaaacaaattaaattgaaaatagttgtagctcattcacatatgtatttgttatttttgttgcaacttgtagaagctgaattttaactgtatgtttgtggagtgatatatttaatactaatctatattgccaatttttttaaaaaaaaattataactatttagatgacatatacgaagtatgaaatcactttacccgatcagagtggttgaattgcaatgtttggtttgcagaaggcagatgcggtggtgggggatgtgacgatcacggcgagcaggatggaggaggtggacttcacgatgccgttcacggagtcggggtggtcgatggtggtggcggtgcagaaggagacgagcacgagcatgtggatcttcctgcagccgctcaccaccagcctctggctcgccagcctcgccttcttctgcttcaccggcttcgtcgtctgggtgatcgagcaccgcatcaacgaggagttccgcggcacgccatggcagcagttcggcctcatcttctacttctccttctccaccctcgtcttctcccacagtacgtgcttgcatcctccttttcttctctagctcatttctactccctccatctctaaatatttaataccgttaacttttttaagcatgtttaatcgtttgtcttattcaaaaacttgagtagtagtactatatttaacaatgaatcaaatgatatgaaaataattaataattacttaattttttaaataagacgaatggtcaaacatgtttaaaaaagtaaaacatgtttaaaaaagtgaacggtgttaaatatttagggatggagggggtactttctactaccaattcagcaacatgatttttgagtggcgatttcaattgtgtgtttttttagaggagaagctggagagcaacctgtcgaggttcgtggtgatcatatgggtgttcgtggtgctgatactgacgtcgagctacacggcgagcctgacgtcgatgctgaccgtccagaagctgcagccgacggtgaccgacgtgagggagctcctgaggcgaggcgactacatcgggttccaggaggggaccttcatcgtgccggtgctcgagaagatgggcttcgaggggaggatgaggagctacagcacggtggaccagtacgccgacgcgctgtccaaaggctcggcgaacggcggcgtcgccgccatcttcgacgagatcccctacctcaagctcttcctctcgcagtactgcaacggctacaccatggtcggaccaatctacaagaccgacggcttcgggttcgtgttcccgagagggtcgccgatggtggcggacgtgtcgcgggcgatcctgacgctggcggagggggagaagatggcgcagatcgagaagaagtggttcggcgagcccggcgcgtgccagagccagggcagcgccgtcggctcgtcgaacctcagcttccggagcttcggtgggctgttcctcatcaccggcgtggtcaccagcgccatgctcctcatctacctcgccgtcttcttctaccgcgagcgcgacgagctccgtgcggcggaggcggccgccgccgcctccggctccggctccggctccgggagccggtcgctgcggcggctgcgcgcgtgggcgcggcactacgaccagaaggacctcaagtccccgacgttcaagaggaggtggagcgacgagtccgtgaggaatggcagcgagtacgccgcgagccggacgccgaggtggggcgacgagagcccgtgcaacgtcgccggcgccgccgacgccgacgccggacggatcccggaggaagtcgtcggcggcatgagcccgttcagcatctccacgagctcggaggagaggaacggcgccgtgtctccggcggcggcggagttcgataactcgtccgatcgggcagcggtggtggcgggaacatctcaaccgcggtagatgtacatgtgacatggcaagttctcccagtagacgtgtccggtaggatatgaacattgacaggtcaagtacaagtagtgtgcaaccgtctcctcgcctgtagatagatcctagtactactgtactactaccagtagatgagaaattcagcaacttgaccgatgaagcattggcagtggctttgtaaagtgtaatatggcaacaataatatgtgattaatgtagatgtattttgggaatcaaatacatacatgaaagcatgttcatcggtatactacctcttaactacttaaaaaattgataaatttccgttcgtcatacttattttccctaaacacatcttagagactaagcttatatatcttaatattgacttattgtcgataagaagcagggcatacatgcactcatgttaagtttagtacttaaaccagctaaaaaaattgataaatttccgttagtcatacttattttccctaaacacatcttagagactaagcttatatatcttaatattgagttattgtcgatatgaagtagtacatacatgcactcatgttaagtctagtacttaaaccagctaaataggttctactacattccactcactgggcgacactcaattcacaaccctaccagaattttggcattgaaaatagcgacaaactgaacatatcctcagttcaagcccagcagcaaaagatttccaaattggcataacaggaggggaaatctgagtaatttacagtacattgtgtttttccacttgattttttttgtttgttttgacggtaaaaatacattacaaatcaagttatatttgatttccactgaaataacctacgacacaacataatttatatgatacaacagtacattttgcccgattgtgctccggccatggctaatccctgcagctgctcccgaactatacataatctaacgatctagaatacgaccctggtatgaaatgcaaaactgacgaccggtgagtagggagctatcagcaaacgagatgctgtacagagcagaaaaatgaactttcaggaatattacctgattgaaatcggggaagatctcattgctccccatttatcatcagagaagggtaaggaactttgtttatctcgataatggttgactgctcctgtaggagtggttgtttccatggctctccatccatctgaacatacgcacgattccattggccacccctcatttcaaacttgatggctgcagcctgatacatggcagcggtttcagaggccaaggtattataagttcatgaagaccagaaaaaaattttgaagaacatctcccagtctacctaatattcagaacattttctactccaagcaaatcttgtggtgtttgagcttgttatagacaatgtggattgcatgaaacacttgaggtttcatagtttttttttcccaacagaccataagatcccatatgggcatcccaaattcccatagagcaattccttgccaatactcaatagaaatatagtgtgccaaacaaatgtaagtacctgagcaatgtgctttgctttaattagctcagccataacgaatgaagcatgccaaccttctttcagaccgaatatttcaagcaatccatcatcggaatgagcttcgacaaaacctttctgggatttggaatagaataaagcatcattttgtttccaaaaaaagaaaaagatgaacacataatttgcatataaatgcaaataccgcatgcgcattcccattaaatgcagctgattctagctactgcatcaactaaactgacagaacgatttcttaaataatacataattatttgaaagaatactgagcaatcatccatgatgcaactttatagtcatagaaagccctacataaacaaactaaaattgagagaacatatgcaatgaacatgataaatgtatattaactactaaccttttcaaggtaatcaggtttaagatcaccccatggatgccttccactgccgtagttgtataaatttaagaccaccagggatctaacactgcagttgggaaaagaatgcaagctgtgaaatacagaaccggattcatacagcacattcaaaagaaagatgagaacaatagctacttaagttccaaacttctcccaaatgggaagataatcaattcaacttgtatgtccagaatttattatatgctgacatttcttccgagcttcataacagtatcatagcacacattacattctgaatgcctgacacaccaggtcaccagccagtatgtacaggaatacaggatcagaatttcatgcttctggtatttttagagagtttttcactactagaatgtttggggcagaaggatgaagggccactaagacattcatatataggaacgtagtagtatctttaaacttttggcatcacacaatttaggaaaatatgtaaaatcctacaatcatatttgaacctattgtattaatcttaattacttttttttcatattttcagctgaagatttgtgaacacgggtcagcatggcatcaggtcatgtatatgcatacgttgtccgttaccaagtgtcatccattatccctagcttattacttacactagtactatacccgtttattgcaacaggatctggagtaatacggggtgggccggtttggttttttacagggtgggctggttcgggtttttacggaatattctcgcgttgcacgggagggaggaagacgactgcgtatttaaagtagtcgagatttaacaaaatgtcagcatctcacagaattgttgagtgattcttttaaggatcataattgtttaaaagccttttttttcatataaaagaaaccaacaacttgccttgaaggcattgtaacttgctcccattcagaacaattgacttttttaatgtaaagtcgcaaaatgttcttaagccccctgcaacaacaaaccattctatcagcttcaaacaaagataaagagaagtgtgcaaacaaaggaagaatatcatagcatagctgtaattttattaaaccatcaaaacatggagagaaaagctaaagacatagttgattgctattgcatcatgattagtgccatgggcacatgaaatttttttggataatgatggacacatgaaacttgaattcatgtcgtcagatgttaactaagaacaaattcatcacgatgtttagatccatgatatatcttagaagtttggtactccctccgtttcaggttataagacgttttgactttggtcaaagtcaaactactctaaatttgactaactttatagaaaaaagtagtaatatttacaataccaacatagtttcattgaatctataattggataaattttcataatatatttgtcttgggttaaaaatattactacttttttctaaaaaaatagtcaaacttagagtagtttgactttaaccaaagtcaaaacgtcttataacctgaaacggagggaatatatcaaatgatcaaaaaatcctataattaacctaaaatcatggcagcttccggattcttgagtggatcaaaacaaaactgcctgacaccataaagttcggactttggagccattttagaatccatggaaaggcaggctgtctttatataccttaactgagggcttgctgtacaaggtgtgcagaaccacccctgtgtgcagctataaccagcatatatcaactgcacgagaataaaaacaaagatcattacaagaatcatttataagataaacatgactgtgataccaacaactatgttacagaaactgagattattcacaaaagcatacaaataagacattgaagctgggttatttcttttttccaatttcaaatatgttatataagcggtgtctcatctaacccatgtatcaggtatgcacagtaggtttcgtaggataatagaacatccggaacttactgtaaaatgagggtacataaacacaagttttgtgcatgtgtgggaatatgtgatctatcagctgtcatacttatctgctacttataaaatatgcaagtgacataatgacatttaactagaacactctgaatgcaaggacttttaagctaattaacaatacagaaataaagaaaatctgtcagcaactcagcaccttatttgcaacaggcccttgagcaagatatggcttttcatcacgaagatggtggaagccataagcaacttgggcatccatccctgttcaatataaaataaggagcactcagcgatgaccaagattccaaataattgcaagaagccataagattcacaagagaaaaatcattaaacaagtattaatttcttgatgaaacttaaacgatcattacatctacatgtcctacaactttatgtcattacagcaattaggaacaccatcttaagttttagtttatttatgtcactcagaatttcaaacgaccagctgaaatactaatttgtcattttattgaaagtctaatcacatgggaactaaagcaaaaacttagaacctagtcacctaaccaccaatttattaaccagatggtctgaatattaaagatctctagcataggcaggatagagataggatttatttcatgagaattaatgcttctaccaaatgtaatcaccatgtaaagttcatgggaaaaaaacagaaggaacaaataaaaaaggttgattaaggattaccaatgctaaggtagttgtagaatactcctttatagcaagaagctttctcaggtaactcagtgccattctcctgcacaatattagatttggtcctttaacaaaaccatatgtattaacatgttcatccgagaacattcacaaaaaaggaggcggtgtgatgttttttaagcatttattgataactgacagaggaaaacaaaatgctagagcaatctatcgaataattatatggacaggactacattgttggtgagtatctcgttcttcacaacaaatgttaataaagtccacgaaacagcaataatcgcattggattacaacaccaagcacagcatacaaaaactactacacatacttagtaagcagagatatgaatagcatatatgcaacttgaagtactattgaaaatagtgaaacatgaactatttgaattatttctggcctagatagcatatagtgtcattgtataactcaacatacaaataactttcttcaggtttatagctccattgctttcaaataacttaattaactagagtacggagtgaatagtgaaatattaatagcatattaactattgcccttatttttataacttcaaagtatattactccctccgtttcacaatgtaagactttctagcattgcccacatacatatatatgttaatgaaactaaacacatacatatgcttagattcattaacatataaatgaatgtgggcaatgctagaaagtcttacattgtgaaacggaggaagtatatatttatttcagagcaataaggtgaatttatagtcaaaacctggcaaagttccaagcagtctgcaggttccgttttcttaagtgcatatggcaactcttttatctctccatctggcatcataactacagcttgccaactgcatgaacattactgtttctcagtgcagaagttgatgaagcaccttttcacagttactatgaacttgataaaaatcagcagtacaaaaactgataattaacatatcaacaccttactctgcctatttactgtgagtgatcatcttgtgtgttcacacactgaattacttagcacaagtatagcagataggtgatcacaattcatatgttttattcaggaggggaaccatattctgcaaagctaatcattattctgtccaagtgagctagcaataaaaaggggagctgataaacgaccaatcatccctatctcacctgtcaagactgcaggtgggagctgtagctgccttgctgagataacgcttcacagctgaacgccaaccaaagggaaaagagccaccctgttcatatgcttattagttgtagtatgagtgaatcgctcaccttccctcaaaagcttagttaacactgtaaattacaaagaaaggatataaatagaacaattgcatcatatatggatccttacccatccaaatgatctggcaagatcatttcctgtaccaagtgggatgatacctgtgggtggaactggttctcttttcaacctataaagatctgtgagacagccaagtacccaaccaactgtgccatcaccaccagcaacctgtcagaaagaactagtgcaaggatgttatgcaaagtagttggaagacaatgagtagccaacataggagaaattcagtaaataaggaaagaacaaggacaccctgtcataaattattttataagtagataggatagtaaaggaagcaacaacctttcataagttttaacagatgctaatgcttgactactcaaacgtgcagagaactctaaacttataacaaatgcagtacccctaataaagtccattacacacgtaccataatcctcaatttttttcgaatggtctccgcacaattgtcaccttgttcggccaatttctccaaacaacccaacccgtagttaatgaaatcagaaggcttcacgacagagagatcaaagacctggaaatagtttcatcagtatgtaatattgtgtcccagaacatacaaaaggataaggaaaaaattctgaaaacatgtgtgaatacataaagtgatcagttgatcatattaaaaaaacagttacgaataatcttcaaagtgtaagtgcaaaatgcttacataggacatcctcaggttccaaacattgatacataatgaacccagataaaatccagtaattccatgttgagcaaaaaaaaaaaaactccgtaaaagataacagtacaatcaaatgactgtattctattggaatagcatgtcaagccaaaaattagaggccgccgaactagtctccagccacttacacctcagaagcaagcatggagctaaaattctgatgtttaaacttttgatcttccctccctgccaacctgccgcttaccatcttcaatatttttcttcatccctccatatcaacaaagttccagggccatgcgagaaagtgaggcacaaatgcacaatctgctggaggctgaagctttcacaacacctatcatccaaccgcaatgttagtatctccatctcctcatcctatccccaagaccccaaccacacgtctacaccccctcttcagaacacacgctttttcgttggcacgtccaaactccaataagcaacataaatgctaatagtaccaattgcacgatgaacttcatgattctacttacggagtactacgtgataacaacaggaaatttagaaattcattttggagatggaaaatcaaaatctagtacgatactactagcaatccattttctataaagtagcaattgaattgaccttatatggcattggtcgagccagaaaatcttcatcagatcacacgcggagctgaggctgttgcccctctttccggtagtagtaccactctagaacgaaagttcatacgtcaccgacagtgtaattccacagaaatacgtctaaatcgctgcgaattttcaaaggaatctcaaaagtaatcaatgactcgcaactcgcgaaaaccataccaagagcaagcaacaagccaacaacccacacaggaacaaccggggagaagcgtgaaaatttggaaacagggttgcacgagtggccgagccaatcggcgatgtcatcacctgctcctcgctgatgagctcgtggagccgcaccttgagctcgggcccgtgcctaccgccgctccgcgagttgacgaacaccaccaccggcgtcacggccgcctccacctccacctccacctccccctcctcgcccctctccgccgccgccgccacgccgacggcctcgtccttggccttcacggcggccgcgaccgcacgccgcgcgtacagcggcatgacgacctgcctccgcagctcggccttgtccacctccttcccccacaccccgcacgcgcgcaccgactcccagatcgacaccctcgccgacggcgccgtcgacggcgccctcggcgtctcctccgctcgctccatcaccggaactactccgtatcactcgcagccgcagctaagcaagagcagcttcgaaatcccctctcctatggcgagctatggcgagctggagtttttttttttggcccgagatgaaattgggggaaaaaacgtgccgactttttttttcagtgggtttatatagaggagatgagttttgactacaccgatttgcgcgttgctttattgctgtgtgtgctgctgctttgcatcttcttggggtgccaatagcgcgtgaccgttacgtctggccggggatggatttcaggagagaatggaaaggacacgaatgatgatggtgtttttttgctctgtcacgactcacgtccaggtttgctgattttgacgctgtctcgcccgtttttacaacctacggaaaatcttatatttggtccggaatacagtgctaagagtttacaatatttacagaattttgttatacttttttagaaaaaaaatccaatatttcgaaatagtatgaactcgaaagagccatcttcaaagtatagtatctcctcgatcctaaaataaaccaagttgttttatatatagattcatacatacaaaaattaaaaattgatttctttttttttagccagcaaatatgacatctctgaatgttgtgaaatcccctttaaagtgttgtggagctaccaaccccctcttcatggtaagactctctgggtgaaaacccgattcatctagacatgcgacagtggtgccatttggtgtcatgacctccttgaagacgttgcctatgaagtattcatcgctcattgccgcccttcctccagcttggtccttggccttattttggttgttgtcgtcaggttggctcgagggacgagtggatcttcttctctctcgtcctctccctctccccaatgcttatacgtgatatgattgggagaccgtcaacgacctcctgtgtagaatttgcgtttggagaggtatgtgcgaccccctatagttctagcggcgatcggtcatgctcaatagcggtctctctcgtcctcaacctctccccaatccttatacgtgatgataatcgggagaccgtcaacgacctcctatgtggaatttgagtttggaagggtgtgtgcgacccctatagttctagcggcgatcggtcatgctcaatagcggtcgatttgatactagagccttctcttgggttgtgtgtttgttttgttcttttcttgttatagtttttcagggttgcagtgttaccttttccctttctgtattaatataaagctttgcacagcaggttgtttcaaaagtttgagttttttacagtggaagtagagagatttaattatagattaatagatacattttctatttgtttgataaaatcaataacttctcgaagaggtgaaactttttaccgtcattatcattggtatagaacaagttaaaggaaggaaaatatgtggaaggtgtggtgccacaatattaaaactatactttatactcttttgcgcccaaaggttgattccttatagccttaactaccaacaaccatacaataaatggctaattaatcaggtcattggtaaagaaatgttattgtcaaaccatgtctatcttgaaagttaacaatcacaatcacgcgcgtacttattaagaaaacatctcattgtttgagcttgcgatgagcatgatagcaatgtcagtgtcgattatggaaatgggcaataattaaaaagaatagcacatgagatctaaaagttgattgatggatgcagagacaagaattaagacaaattcagggctctctcgataagaggtaataccttactattatttcggaattgtatctgtcgggtgtatatattgatatgataatctaattgtgacttatcttgctatctctggttatgtctttggagagcttcccgctcaccttatataggttaggggtagtgttacaaagagtaatacctagccggacacagtatcagtttcctaatcaattacttaataccggtcgggattctaaattatgttatagaacataagacaacattgtgatcaagtcctactctattacatagtacatggatttggctcacctcctatctctagtcaaatatagaagtcgtgtgggtacccagtaccccatattctccatagtcaggttgtattggatcacttgctctatcaatacctacagttatacctacatagtcaatccgttctatgcaattatgcatagaagtgttccgaccgatgtgattaagagtagtgatccagctatccttattttatagatgatgtggctcaacgtatatatgttgagtaactgaattcaaatatataggaagagtagataactaatttgacactgaattttaaagatactatgggagtatttggtagtgatatcagtggcagatctaacaatttctttgagcctgcgcaaacctaacaacggataacacatacacataaatctataaaactctatacttatatttcatgcacgcaaagaaataagttgatagacacaagttgtgatttaggttgagaaaatacgatctaataatttataataacgagaagaaaaaaaatgcaactcccccttaagttatcagtttcacgtcctgttatagtgagaaaaactataacagtgaaaattagtataaaatcaacaaccatgtttttacgccttcttttctttttcctatgatcctacctatttgaaaagtgcaatatgtcgaactattttattttgcttgactttggcttaacaagctctattactcactaaacagtagtcataaacagcaaggttagcttggagcaatgtcggatctgttttgtttcaggcaattgtttatgttgccagagtgattggtgaaggaccaaaagtgcacctaacgattcgtcgattccttcccgttcctttgcaaatttcccggtagctctcgtcatgtggaaagggtgggatcggagaatgtgtgtagtggtctagtggggcatccaatccagccacccacgcaaggcggaacccaaacccactgggagcactgcctttattccggcttctgctctgctgccagtggcgtcaagcacacggttggtagcacgccgccgcgcgcgtacgcagcagcaatgacgcctctgccggctaaccacctcccccaccacgttggtactcctactaatttccatgtgagcccccgcctccgccaaggcccacctgccatggcacagccggtgcattggctggcccgcgaggcggcagatgacgacaggatggggattggggagacggcagcggcacgtgcgagccgcggtggcgtggggtgggtggggtagttgccggctgcaggcggctgacacacagcgcgacatcatcggaaggggcattcaagtttttgaattgatgacgggatgggaggaccgcgctccccgccccccggtcggacgttggacatggcggcgggcggaggaacccaagtgtgggacccagcgctgcgcatcacaggagaagtcaggttaccatcgtcttcttcttctagaaagggtgacttctgaagaccgaagaggaggtcctccgtactattactacgcgtactactacctccgtgaaaatggttaggcggctgcgtggtgcgtgctaaaatggtccggtgatttcactacaattcaaatgttctggaaatacgagtactcggtagtaaaattgtgctacgacgacttgctacaattcaaagttctggattctctctctaaaaaaaaaatcaaatgttctggaatattacgtagcggtgcttctttatatcttggccgtgagcccgtgactcatcagcatgcgttatgtactcattttgggtgtactgtatcatatacttattttggatgtgttcttttctctatgttctcgacttctcctcactcgttttttacgtgcatgtttcttaaatcactaaaaaaatatgtattttgtaaaattttctagaagaaagttgttttaaataatcatactaatatattttttaaagttttttcagttgattcataattaattaggcaccactacattccatcattttacatgcctatctccgaccatagccggaaggctgatcaaacagcttactatagaaggccatgcatcctggtgaagcaacccaataactgggctggagcagggttagcctctggaggtaaaggtccactttacttttttttttaaccgtaaaaccagatattgttcgcgcaccagccatcgaccatgcatctgcgacattggcaacacagttcatggtgttgtcggtgggtaggcatggttctggtaggagtgggggtgagcgcggtgtgaaagatgatggtgccgctgagctcccctccttattcccggtgacttgttctggttcttctcgtaagttgattcggacaaataggcacgtgaaaagttttatttttttttctttagtatatgtctagcaacttatggcatgttcgacaagctggctgcggctgcgtcgtgtgcgtgcgacactattggtgccggctgcgccgcagcaggccagcagcagaacaatcagtcgaataggcccttaaagcagaccagtgcaagatgaaagttttgttttaacacgttagcatcacgtgggtgtcacgtcacataaaaaaccaagtcaaaagtactagtgccgcatagaacaaaatcaccattaaaaccacttagggatataaaatgatttggttttagtagttaagggaatctctatacctggctttacggttgaaggatacaaataaaattcaaagcatatttgagggatgcacattgaactttttctgctaacaaatgggcataggcctacataaatcggtccgtgtgaccataggaaagaggaaaaagtacaccaaaggtcccttaacttgtcattgagttacaaaatcatccctcaaccataaaaccagatatatggcatccctcaacttataaaaccgttcactttagattcttcggtggttttgaccctggttttgtccaatgtggcggttgagtcagcgtggaactcacgtgggccccccatgtcagactgtccacgtcgtctctctcttttccctcttctcttcctcctctttatcactcttctcctcgtctgggactctaggcagggtggccaacgggtgcagaggaggccggccaggcaaggcgggaaaggaggaggtccaataaccagtgacgggtggcactgtggcggctactccggccaggggcgcaaaggagggagcacaatgcctcccctcctcaccgtgaaggagctcaacgtcgcccagctgggcgccggggtgaggcaggcgacatgcgacgtggcgacatgggagaaggggccacacgacgtcggtggactcggtgggcgcggaggtagactcggcgggcacggtgccccggccttctcccgcgccgcctcctccctcttcttgtgcactcgctaccggcctcatcgcctccggccggtggacgcctacccgcctcacctccggcttctcctccaccgccgtttcgaatcacccatgggacactagagagaggagcacaagccccgccgtggatggtgcttgcggaagggagagaagaggggggagagagagatgacgtggacagtcgaacatgtgggacccacgtgggtcccacgcgccagataaaaccagggccaaaaccaccgaatgatttaaagtgaacagttttgtgtggttaggagacgattttgtaacccgatgacaacttgagggacgtttgatgtactttttcctataaaagactagtacggcatgctggtttcggctggaccgcgcagaacgcgaactccgccaacaggcgtcagacggtcagagaccagcccaggcacgcctagctgcccgcgcggcccaacagccgcacgcgctttgaccgtttttccttcggaataagttcactttaggtccttcaatttgtcggtcagtccgactttcgtctcttaactgcaaaaccgggtatgacccgtccctcaacttacgaaaaccgggcaaacaagatccctcggtcagtccggttttggccgacgtgacgcctacatggcttctttgacttggtcttcatctcatgtgacattgacgtgacgcttaggtggcaattttatatctcaaaaaataataaaaatcgtgggacccatatgtcagctacacacaaaataaatcctctctctctcccggccggagcaagcgacgggtggggcgagccgcggccggagcaggccggcggagcggcggcggccggatcaggcgaggggcaaggcggtgctccacgctctccctcttcttcctcatcgcgccgtcttcgggcgcttctcgcgccacggcgctcgcctcacagccggcggagtggtggcggagcggagggacgggtggagcggcggggcggcggcagaccgcggggtgagcggaggggcaggcggagcgccggcggcagcaggccacgggcggcggaggtggccgggggaggaggtcgccggcgagcgcggcagctccactccgtcggccgctccgcccgccatgggtctggacatcacctcgccggggaggttgagggtgtagtcggtggtgccggcgccgacgaggagttgcgccactcgttgctgaagttctcacggaggaagtcctcgaacacctaacgtgggatgtgcgtcacgcccggctccaccacccgcaccggccgcccgtacggtgtcctccccaccggcagcgactggatcccgccgccgtacaagtacttgttcccgtacaccagcacgcccgtatgcctacacaacaaatcagattgagccaaacccaaatccaaaaatccaaatcgtttagaccagaataaacaaacagatctggaacaggatttactcaccagatggcctcgattggcttgcggaggaaggaggtggagagctgccgcgcgaggctgttgctcaggtcgtacacgttcagaacacccttgcccagagggaggagaaagggaggcagaggacgaggtcgccggcgagcgcggcagcaacactccgtcggccgctccgcccgcgatgcgcagcagaacggcgccgcccctcctcgcccggcgtcacccggcggagaggacagaggagaggggagagagagtgaatacagggagttgggggagagaggaggaagaagaggaaggtgagaatgacacgtgggtcccatcattttaaatctatttttttaactgacatgtgggttcctaatttttaatattttctaaatcaaattgccaagtaagcgccacgttattaccaagactgagtctaaatagtcacgtaggtgccacgtcagcgaaaaccaccatctaaaccaccgccatggacatatattgcaccggttttgacagttgatggacctgttgtatctggtttttcggttgaaggatgaaaatcggattcggtaagttaagggacctcggatgatcttatgccttttccttcccttttctcacgcggtcacgcctgatttctagcgaaaccgaccagaatccctattgggccgggccgcaacaccgtgtcacatccgatctctccccttcctttataaaagcaccagaatcctagaccacgattcctcctaacaaaccctacgtgataactcccggtgcatcgtgttacgtcgcacaaccatcgcagaagagctccccggaacggaatcatggcggcgacgacggctaagcaccagacgatgcggtggagcgacctcgacgaggacgacgactacggcggcggcggcggcggcggcctcagcgccctgcagctcccgccccgcgtggtcatcgggccggacgagaacgggatcaagaaaaccgtcgagtaccggctcaacgaggaggggaaagcggtgcgggtgaccaccaccacccgcgtccgcgaggtcgcgcgcacgcgcgtcaccaagcgcgccgccgagcgccgcggctgggccaagttcggcgacgccgcgcacaacgacgacgccggcgcgcgcctcaccgtggtctcccccgaggagatcgttctcgagcgtccaagcgcaccaggtatagcagtagtctcttcttcactagtactacgtatatacgttgctcgttaattgcaactttgctagatcaatctgcaacaatggattgatcgtttttttttttgaatttgtctttttcatgttagccgtgtatagatacgtgttacagatctatttagactaggccatgtagtatatctgagactgaacaaaggatatactaattccttttcttttcgacataaaagggatactaagttttgtagcaattccgatccgttctaaaaatacagtgtgatatttaaactattcatgtatagaatatctatccgaggaatataaattctaaacatacacccaattctgcatgcaaatctttattcgctaactgttctacactgcagggagcaaatcggaagatccactcatccccgcactggacaagggcgccgcgctgatggtttgcaggatctgcaacgccaagggcaagcactggacatccaagtgccccaacaaggacttcgcccctctgcagctcgacgctctcgtcgacaacaatattcctcccaactctggcggcgacaatggcggcggatcccggccgggcaagtacgtgcccccgaagccgagggagtcggaaatgcggcggaggaacgacgagaactcggtccgcgtcaccaacctgtcggaggacacccgcgaggaagacctccgcgagctgttcggcagcttcggcccgctcacccgcgcgtacgtcgcgttggatcaccggaccggggagagcagggggttcggcttcctcagcttcgtctacagggaggacgccgagagggccatcgctaagctcaatggctatggctacgatagcctcatccttaatgtcgagtgggctgctccaaggcccaactagcctttactagcactaaaattttctattccatccgtttcaatcatattataagttgctttgattttttctagataaaaaattaagtttgatttaaatttatagaaaaaatataacttgagttgtaaatgctaaatgttagttttagtgaaactaatttggtgtcatagatgttgctaatttttttctataaactgggttaaacttaggaagttttaactagagaaatggtcaaagcgacttataatatgaaacggagggataacatagtattatacttactactatctgctttgcatgtttcatactatagtgttggattagtgtgatattttgttgaatcaatggtttcatcagttataatattttgaggaagttgcatggttgaatgttggtggttggttatgtgtgtacaaatccaaattagtgagaacactaatattactaggcccaatagaatgtctctgaggcctaacttatccggcccgtagactaaaaagcccatcaacgtggataccgccttacagatcggggcgcacaaaacgatccgagccgctcgttccatttccattcctacgccgaggtcttcttccccactctctccctcccacgccgccgcccccgcaaaccctagcgaacgcagcggagagaggagagagcgccatggccgtggaggtggcgacgcagaagatcaggtggggagagctcgaggaggacgacgagggggacctcgacttcctgctcccgccgcgcgtggtctccgggcccgacgagaatgggttcaagaaggtggtcgagtatcgcttcgacgacaaggggaacaaggtgaaggtcaccaggaccttccgcgtccgcaagatcgcccgcgcccgcctctccaagagcgccatcgagcgccgctcgtggcccaagttcggcgacgccgtgcaggaggacgtcggcgcgcggctcaccatggtgtccaccgaggagatcgtccttgagcgcccacgcgccccaggttgtcactgttcttgtgcatcccccttcctgtccagatctgcgtcgattgacgtgttctcgaatcgaattatttgtttatcgttgtgcgcgatcttcatcagaactagacacgatgtattggaatgtttcgtgctgtctattcctctatgtgagatagattatagaatcgaggctggtgatctatttaggaaacagctggtgctgctttccttgaacactacatacgtcaggactctgttataatttttcttgcttgcttggtttcagttttatcatttgcaggcacacatctaggtagaaagaaatgtgcaataatgttaatcattgagctttataggagcagttaatctgcatgtattgaaaggagtatttaaatgggtaattatggtgacacaagaatgtcatttgaagttttgtttaattttgaagcgattctggggttgaatatttttaacattgagtggaaaattaataagagtccaaagttaatatttttggacttgagtgtaaagtttcagttagatctttagagaagctgcggttgtttttaatcgaatattgagacaggggacatcgataatgcagattaacacgtctttattcttcctaagagaagtgttgaaaatactggatagtggtggatcaggaaaacaattcttttgtgaatacctattatgtgcgtattgtgtaattgattgtggtttggtgtgttagtcatgcgtattgtctgatgatagaattttcatattgcagtggcattgtatctttagttttgttgttcaagaattatgcataggtaattcgatatctatcatgggtgcatgccctcgtccagtcgtccttataccaaattgatcttcgaagtacatagtatcgtcacatttagttatgcttgttataaccaatgcttttggtcttctaatgcatcgacacaaatcttcttagtggagtgcagccttgttgagatccttcattttttttgttccaaatgatctatactagctgactttgctttagtcttgtaaatgtttatgcctttgtcttcttgtttgctaactgtcacttaattttatagagtaaagctgaagaacctctcccttttttccccaaaggctcagctaactttgctttagtcttgtaaatgtgtatgcctgtcttcttctttgctaactgttcatttaattttagggagcaaagctgaagaaccaagtgcttctggtgatccactggcaagcaagagtggtgcagttctcatggtttgcagaacctgtgggaagaagggtgatcactggacctcaaagtgcccctacaaggatctagctccccagacagaagcttttgtggacaggcctcccactgctgatggctctggacctccaggtggcgccgtgaagggagcatatgttcctccaagcatgaggtctggtgctgttgatagggttggacatgacatgaggcgtaggaatgatgagaactctgtccgtgtgaccaatctatcagaggacacccgtgaacccgacctacttgagctattccgcacatttggtccagttagccgtgtctacgttgcggtggatcagaagactggagcaagcagggggttcggcttcgtcaactttgttcacagagaggacgctgagaaggctatcagcaagctcaatggttatggttatgataaccttatccttcgtgttgagtgggcaacaccaaggccaaattaattttgttactccctgcaagcgttacatacttttcatgaatgttcgatcagtatgtctcttgaaatagtacttttggtttgcgcatatcctgtgtcctgaacttaagctgtactatttttgcttggacgagaataactgaactcgcagctatttcctatatcagctgatatttgcaagtgtgtttgtatggatgtgcgagggttccatatttcatcttgttcattggagtttttcttaaaatctgtttgattgtcgctcaacctgtgcaacccctacaactgcagcttcctgcaatgtgcatgattctttttgatgcccctgatcacgagccttggggagtttcatcatcaaatcgacgttagctaaagcaatgaacaggttggatgctgtaacaaccggcaaaaatctgttggcaaaatacatctgcacgcggatagattgcagcgtacaacagtaggaaaagggacttaacagtctgacgaatatctcagccacgccgagttacaattccatcagggttctggttgtctgtacctactactaatactcctcaaaatagcagcatcattcgatgatagtattggtacaaaaagggttctacaaaaaggtcatatcaaggaccttaagaaaacagcgaagtatatgtctcacgcctgtactgcaaaacctcacgccatatctgcacttgcagctcttcctctctccaagaaattcagcctcactcatcgaagtgagaggcatggtggatacaaatgaaccatttgccatcaaccttctcaaacacattggtcgcaacctgccttccccagctgctgctccctttggtcttaaccagctccaggcaggtcacatacccaagatcacctctcacatggacctcaacatcctgcagatcaatctggagagggaactcgtagtccgcgtcgcacaccatctcccagctctgcatcaccatgtcgtagcccgatatccggcctgccgaaggatgaacaacgtacacatggtcgcccttcgcccatgccgagtgcattgcgacaagatccccgttcttgaaggcattgtagaaccgcgcattcgctgccagcactgctgacctgctgtcctcctggaggactcggagctcgtccctgagcttcgcggcctgggcatagttttcttcctgaatcgctgtttgcaagtcacgctgcagagtttcctcgtcgcgggtgatgctctctgtgcttggacttccttctgcctccccgcttttgacatgaactgtccgaactttgttcgcgcgggtgcttgtcatctgaagccctgtgctgttgaaatgagaatataaattattacaacatactaaagcacactgaccaaggcaatttgttgaaagtacataagcattttggtaagaccaggcaaaacattgaaagtaaacattttgttaagttgatgtcactgtctagctactagaataaggtacactagtactgactactcactactagagtgaggactaactgaacaagcgtagagaagaatgatatctaacagctgatcaactgcataatggatgagctacgaagttggtcaatgggtggcgctaaacacgtagcgagaatattgccctaattgttttgtttttggtgttcacatgtgcttcggcaacctggcatgtacagtcaactctgttgctgattttcggttttttctcctgcttataatatagcgtcaacctccttcgttagccttttcgaaaaaaagaagaaaagactgatatatagtacttgaacctaatgaaagtaacttgactagttgagcaatctagttgtaaatcacatgaaaagtaaaacgttattgaaacatttttgtttaagcatgagtatagagtaaatactagattcaaccagtgcattgagaacttagcaaaactggacctagctggctagctatagtaagttgaaacgatttagtgtcacatgatacgaaatatagcatcttggaatcagcattttcacttcagttcggactcgaattcagcctcttcctaagtgtgacacccgtgccaccaaattcacttcagaacaccaaaacagcatagaattttcataattcagtgcaaaaatgctagcaatttatacactgaactttgaattttacttgaactgttcttgtctagtacagttcagttccacgagatgatgaactgagcggatggggaacctgcttccttagcgtcaatcaaagcacttcacccccaaagcatgcaatttccgagccgatagcaagattcatgaacacaagatacctcctttgccctaaagtggcgtgtatcccgacgctaaaaaactaccagaacccaatgtttcgacaagaaaccccagtaccccactaattaagcttgaaagctaagaagcttagagagaggaggtcttacaggctcttggccccaactcggaagcagcttacagctgcagttgaggcactcgccggagcagccgcccgccaccaagccctcgccggcgtggacgccgccgccgccgccatagtagcagaaggatttggagctgccatgacgagatcagtgtggatttgggtaaggttttaccctggacctatgatttcatcctcctcttcgtttcttgggccgttttgctcggcccatctatttagcccacttatcggccccaaagccacagtatgccaggagtgaaaaaaaccatcagctttttttctttttcatttttacgattacacagaagaaacacacgcataaacacctctatacactcacaccttacttacatatccgctaatgtatcactaacacacactcaaagagaccatctgtaaatccttagactcactaaaatcctattgaacgcacatctatgtgttcgtaatattcgtgaccactatagtttgaatttgatggatcgactcatgacttaaccaccacacttatagtgattcccctttatctgttcgatttgcttctaaatgactggacgcaagttgtaatacatctatcatcatccaattaagtttctatacaaaatacaacttatgcagggaaaagaaacaaataccgttaaggagtaaagtgaatcgatttcaatagtttaggagtgtaaaaaaaagtcgaaaagtagtttaatgggttaaatgctttgataaaatagtttgagggagtaaaatggatattttcataaatttattatcatggtagaagttaattttgaccagtatttttgctagtaaaatttgaaatactatctagaacgtcgcattgcatatgtaaccatcatccactgaccacaaccagataattttgaaaacaatattagccgacataaatagtaacaatcatacactgtcaccaactttaaagaaaaaaagagagtagaagggcctcaatcaatttcacattactattcctcgacatccaatctgacccacgcagcgttaattctcgcactgcctgtttgcatctatctgtgtgagagcgactcctgaagaagccgctggccccagctcactgaacaccaaacagtaagcactgggcactacgtattctggagttgtagctgtacaatacatgttgcatctgctgctgcttttgccactgtcgtcgctgtaggcatgcagtactccctctatcacaaaaaaatgttaatttcactagataaaatgattttacagttcttaaaaacatatcgggaggtatcacatcttttattgggaattttgatatctctacgtaggtatgaatatacacactaaaaattttgataagtacctgtcaaaaaccttaactttgtctttgagagatgggacatatataagtaatgcgtatgtcttattcgttcaaaagtttatattttgaaatagagatagtacatcaagatttacagagagaagttgttttattcatttttagaaggaagtaagtctgctgctaatcgttgcgactcgatcctaccaaccacaacattttggggccaggcaatgcatggtaaattggcaatggcatggcactgaatcctgtgggggcaagcagtggaaaattaagaagcaaagctgccgttgcccatgccagtgcagcagcaccggctcggactttgatggcgcagaaattgaaacggagtgcgtggaggatggctgcagtagtgcagtgcagtgcaatgcagtgttgcagcttcgtctttgattctttctcctctatctgttctgctaactcagctgctatagttcataagctgtggccaaaccaccaaagcagggaggggtataatttaccactttatctcccactcccagtgagcccccccacactgctgcagtgagatgctgggttgcattggcaatggcaaaggcaaagaaaagctaagctctagctaaggtagttacctgcttaacgtgccgctattttgtcctctggcccttatccctaaacatgcagcaattttgtccctggcatctagctatcgatccactttgctgctgctcctgctgcaatgcttgtctgtccatctattctcctcccactcagagctcattgcacctactaccaagggataagcttatggtgactgattctttgagactttcagaaagatacaagtttaccagcacgtcactatcttgattcagagatttgttggcaataactttgcattgcttcacaataacttttcgtcctaaaagaccatatttgttgtagtgatatgtcctaacaaatgatcacaatttaccatttgtgtcttagtttattgggaattatgctctgaaactggttaccacaacaccctccagcttaattatactagtactttatcagcattcagtagacactttatagagttggtttttgattatgcgagcatgatttcacatattatttactggttaatagatgtacagtagacgatacgcagaagatggcaaatgggccagctgagctgagagcttttcttaattaatacatgcactttcagacttcagaggccgtagcagagagtagttataacgaaactttagctttcagtgcatttgtcctctggcccttatccctaaacatgcaaccattttgtctcaggcgtctactagtgatcactaactactgttagctaattaattaccaactgctctctttaccagaggggaattttggcacggcgacaaatcatcattccatctattcccttccatttcacctcacgagaacgaaatgtactgcaagatatcatattgtaacgacatacttattcttgtgtgtgcatgcattcctagaggataacattggtcagtgggtacatgattaaattaattaactaaacaggagttttaattaccctgaagcacttaaccaaatacaactccccagcaataatatgattatcgctgcattctctttcctaattaagatagaaatgcccttatgaagattagtcaatcatggaggtatgtactaatcatcatgaaaattaaatctggggtagaatttctgctgggttgctctgatcaatcaagaaactgaagaatcgagcgtgatacagcagtatcttccatgaaaagacgtactcctatatacgcacaaagccaaatattccagccgtacgaccgggttcactgacgacaagagaggaagatgggtgtgaaactgtaaaaatcctagtagtcctctccaagctgattatggcagatgtactaccgaacaatagattaacccgggcggggttaaaaggtgattagttacggcatggtctcgccgcagtaacttttcctcatttttttggatcaactcgcgtctttttggctaaagcggcggcagctaccggccggcgtgcgctagctctgcttgctgctgctgcatacgtacaacatagcatacactgcctagcttagcttcttttcggacgacgtcttcgtcgtcgtcgtcgcttgccggcatccgagacggcatcgcatacgcgggacatgcccttttttgaccacctttgatgatctacctagctcctctctctttctacctcgggcggctactgaatttttttttttaccagctgctgataggttgtatgtaatgtactactggcatgcatggcatacagttgcttcttgcttgcactcgttttagctaggattcaggaatgtcctgcagaaagcattgggctcgatcgatctgtgtgtgtgtgtctgtgtcactgtgtatgtgtgcagaggtgtacaggacttgcatttggcatgtattcagtgagtccatggcaggtagtaggagtgtgtataaacaggctagttcgtacatgggactgtatgggttgtgaaccttatgtgtaagagctctgttagcattgcctgcattcgtacaggcaatcatcaaatactagccagtatatgactgtacattgcatgcatgggacttgggctctactgatatgcagtatctggataggtttttaacatgaaatgtcgtgtcagtttgcaggtggttaaggtggtttgtgcaagaaaaaattgcaaaagatggcaaaacgctgtgaataaccaaacctagagtgacgtgtaatacgttagggtcgttactacatgccccctacatatacatgccattaccccaatataacagtacttatcaaatccttaaccttgaaatattgcatatatatatatatatatatattgatgtatcctccatcatttaactagttaagaaatcaccaaaaatgcacgccgaaacgtctttgttccaattcattaggttgctgactaaacgtcacgaacgactgctagctacaagatgacactctttggtccatgcatgcatagttggtaggtcaatgataataaggaccggcaaatattaagggacccatgcatgcttgtcttgttgaaatgaatccaaaatgtgattatcaaaacaactactccttcctagccccgtacatctctaacttctgacagctgaacatttacatgtactaatgtacaaaatgatgatgatcatattgatgaccaatttaacccaaaaaaaaagagtaaacacgtgcatgcatgccaggtggactgcgtcatcagtttccgtcgacggcgacggtcaccgacgtcgggaacacctcgccgtccttcctccggcggccgccgctgccttccaccgccgacaagctcaccgtcgtcgcgccgtcgacatcgttggcgctcaagctacgtttcagctgccgtatggtagggcacagcacctcgtcggcccacgcctccaacgacgtggctgactctcccgccgtccacgccgcgccggccagcctgtccagcacgccgtcgtcgacgtgtacggacaaaccggcgccggcgccggcggcgtccccgagcttcgccgagaccacgtcggagacgctccgtttgagcggcccgaagtcgacgggcttgaacaccaccgttgcatccacggctttggtgagctcggagaagctcgacggagccgagaacttggcggcggcagcggcgggttggccgtactcctgctcgtgctccaccgttaggtcactggacgagttccgggattcctcgccgccgctgtcgtcgtcgtcggtgtgatcctcgcacatggacaggttcaggtcaaggtgaagcggaggcgagtctttgcgcggtttcaaccgccggtcgccggcgccgtcgagcggctgcggctccggcctccgcttccgtgcgttgttccggactcggagctcaaggttccatggcgagtcggtgaactgatgatcctcttggcaccgcctcgtgtcgtccagcgacatgacgacgaagatggcttcgccgagggcgacgtcccggccgcgcgagtccacgaggcggccggactcgacggcgcgtagtatggacgcctgcacgactctgtcgtcgtcgtggtggtcgaatccgtcgagcacgatgacacgcagcgggttggcacgtatggcgtcggccacacagtccagcgccgtccggccgcggcacgacgcgatgggctcgccgccgttgccggcgaggcgcagcgcgacggcgttcgtgccaaagaccgacatggacagcgcctccgccatcttcgtcttcccggccacgtcatggccggagaagaggacccacgtgtcggccctggtgggccccatgccacgccgcttccgctcgccggacctggccttcgtgatcgcagcggcaacagcggcagcagcctcgggttgccatcgcaccgcctccgtgagccgtttcacgagcagcttctcgtcggtgtcacagtacgccggtggcctcgacgccgttgatgccgccggcccaagcgcgaggtcggtgtccaccgcggcggcaggcgccgccgcggccgccggtggcggcggccttactggtatagcctgcatgttggcgaggacgcttgcgccgttccattccgagcaagtgaccatcgacgacggccggccaccgccgcagccgccgccgccgtgggagtgcagctgcgcgcaccggtcgagccaccgacgtcgcagctcgtcagcctcccgcgccttgtcctgcaaagcgacagacacagagagagagattccgcacgtcaatgcgctgctcacggcgacggaacacgacgcggcttagtttgtcgttgtcgtgcgcggcaaaaaaaccaaaccgaaccaacctgcgcgcggtcgaacggtggccgtgcgctgctcggcgtcccgatctgcagccactgcgacatgggctgctccgtggcatggagcgcgccgcagcccggcgacgacgccatgtcggcgcgctcgcgctcgtagccgtcgaggcaggcgctgcacaggctcggcgacctgctttgcattgcactggtggtcatcgccgatgacaacacctccaccgagctgctcaggatgcctctgttaactccattaacactgtaaaacacaaagagaacacaaacacatcgttatcgtcgtggaaaaaaaggcgaggttgatgatggaggcagtatgctgtgtttgtcacggatgcaaacctcggcgagaggccgagcgatgacggcggcggcggcggcggtcgcggcgtgatgggcacggcctggaggtcccactcgctctccagcgacgggtggtacacctggcacttgagatacgtggcgcacgtcgccgtgccgatcacccagacgcggtgctcgcgctcgccggactgcctcaggatgcgcgccatctcggccacggcggcgcgcgccgtgtcgagcaccacgtccctccgcttctcttgctcgccgggggccacgcatctctcctcgacgagccactgcaggttgccgaggttgacgacgacgccggcgctcctggacgccggcgagagtagctccgatcttatcgcctcgccgagctccttgatcttggcggcgagctccgccctgtcgagatcgaccaggtcgccgaattctctctggaaggagatgactcgcgcattgccgagccgttgcctctgtatcatggtgacaacctcttgtaccacggcgtccacgtccaccgtgtcgccgacgagcaccgggttgcgcttcttgccccgcttgagaacttccaccaccttgttcacctcctcctcccggtgggacacctgccggtgcagcactctggcgttgacgtagacgccggagtcgggggcggcggggtcggagagggagcgcagcatggcggccttgacggcggtgctggagaaggatgcctcgcgcatgacgcgggcgacggaggggtcgtcgaggatggcgagcacgaggtgcggcacgccgacgcggtggtcgtccgcctcgaccacgccgctgccgatgcggcggtggtgcgcgtacgcccgcttgagcgcggcggcgagcgcgttggagagcggcggcgccgcgtggtggtgctggtgctccgtggacgtcgggaggcggtcgagcgcgacggcgaagcagaggtcgagcgcgcggcaccggagcgggtgcggcgacgcgaggcccgccacgcaggcgtcgcggagcagcggcgccgggccggacagcagcgcggccgccgcgtgcagcggcgtggtgtgcgcgtgccgccgcctcgacgcgtccgccgcggcgcgtgacagcaccgccgccgcgtcgggagtcagcggcggcgcggccgacggcagcgacgccaccgccgccgcggccgccgtcgccgagtaggctctcatgtctgcaactccgcgcgcgtggtgtacgccgtatagctacgctacgggggcgccggtttgttataggtttagccgcgagtgctcgagtggttgctggcttggtgcggttagtttggctgatcgatcaggtgaggtgaggtgaggcgattcactcaagtcgtcatgtaaaaaaaggcaggggtggcgaggcgtgcgtgcgtgtgcaactcaactgggaaaaggggaggaggggggggggggggggggggggggagacggagagagattatttgacgttgaagcatgtgtgtgggtatgtgctactggcagggtgggaccggacgggccaggcaaagggcactatttggatttgacccttccgaaatctcatatttggcatctgtactattatcgtactatgaacattgttcttgcgagtcgtttgaattcctatgttgggtgtgttttctcgatcgtgcgtgtagtacctccccacttgttggtcaaatgattacgaaaagtttagaaaaaaaatggtccgcagacggttaaacctgaaaccagatctgtcaattgttatggaaacttggtgatactcttcttgggtttccatgcaaaagtttcaacggaaatttttgacgcacgagtccgtaatcttaattactagaaaggcttggaaagagagaaatgccaggattttggagggaatcggtagaagaactgcatgctattgaggtctcatggggtatagcagaagaatggtgggcatggtgcaacttcattttttttttctaaattctcatcgctggaatttcaacttcaaattttgtgaatggtgggggtgcatattcattgaaaaagtctttcattttgggagaaataaacccgtgagtgcacattgtgaatttgtgataactgataaggtttttgaaatcagcctacccataaggcaatgactttttaccattgcatttgcctagatgttacttcccaacatatatcaccagagacggatctagaaatttgatagatcaatatataatgtatatatcggtgttataacatgccggtcatggttaaactatgatattatattcatttataaacaagactagctataggttttaaaaaaagtcgtcagcatcgtctgtcccaattttctatgttagatccgtccttatacatcactaccctgtatgcctaataaacatatagctagaataaataaaaatatttttgaactaatattcatataatcatatttatatccttgatggtttgatataaccagaataaatagaaatatttttgaactaagattcatatttatatccttgatgctgtccaaaaatatttttatttattctagttatatgtttattcggagtagtgatgtacaaggacgagaactatatcattaacgatagaaatagaaagcgataagaggaacatctaaattaattcaaatgaaattcaaaattggctacagcttcgcagacatgcatgcaggtaagaacaaccgcttgcaaccagctcgcccaaaagtttaaactgttaatcaagacatacctacatacatacatactgttgaccaatctcacatttcaaaattgacgactcaccataagctcgatcaactaccagaccaggcccctaccacatcctggtccactacacaaaaaggcatgcactacaatagtatagttacgtatagtacgtacgtgcccccccaacggtggcgatcgcgattcatatgtattcactcattcaccgaacagtgatgcatgggcacatgccgcagtaggtggtttggctggccatgcatgcgtgcgtgcgtcacaccaggtagacgccgcgcacaagccaccacggccacggccccggttttgttcgcgaggcacggggagaacagcatgcgggcacccgctacccgcacaagccgcaacccaacaaaatccccgcaaaagccccctccattttaaccaaacccaccacaccgtccacaccacaacatcacggaaaaaaattcagtggagaccggatgtaaccggcctcttatacagccccgcttcggatggatgccacgtggatgacatagggatcgaacggttagctcggtccggctcccggcgttgcgtgatgaggacacacgcggcttggctccacgagcagccgtgtctttcaagctctccgtcggctcaattcgacgaacatcatatcgcatctccttttgcctggtgagcagcgacccgcgtcttcctccggcactgcaggggtcgtccttttcctcctccggcgccgcagacgtccctgagactgacatatatgggactatgggagcaccatggccgatgtgccgagctccaccaccgacatcgcttctgatgtgctcttcgtgcttgtgttttttggagatcggcttctaaaggctagagcttgaaccgtttagagtcgagggtcaggtgctgtcgccggccgcttctccatggcatgagaagaaaattaacatgcaaaattgaagtgccgtaggattaggaaccagaaaacaatatacaatattcatatcagggagaagaactggaggtagggtcatcgtcgatcgaagccgtaatcgatgaagtattgcgtttcgtccgtggcggccgccagaaattggaagacgggtacagtcgcagccagcatccaaacgcgccgcgggatcaattgcctggcgctgcggctcgccggcggcggccgcctggaacgggaacagaaagacggtcgtcgatgcagccgatatccaggcgaggagacgcgatctgcgttgaatcgagccgtcggcgaggctgaaagccgcgtctgcgcctggagccaagccatttgcatcctcgtcacgcagcgccgggagccgggccgagctaaccgttcgatccctaggtcatccatgtggcatccatccggagcggggctgcaggtgagaccgattacacccggtctccaccaaattttttgcgtacgcacgttgcgcacatcggcccccgcaccgatcacgttacgtacgcctcatcgcgacgcgacgcgacgcacgtcgatcgcgcgcccgcgccccacacgctggtccgggcgtacgctgcgatcgatcagcgggagcgcatctgcttgtccatctgcggcgaatgatatgcacgcaacggcatcatgttagtatgatgacacgtctttttccccacaaatactagctgggtgagaaaagaggggggttgcgctatggcagctgatcgatcgatgggggtacgcgtccacgcacataagctcatcgattgcgttggcttttttcttctcgatctctaccttagctttagttcttggaagaagatgcatgcatgcatgcatgcatgatatgcatggaggactcatccttagcttgaatagttgcatatctggtggatgtgcatgtatatgtggctgatttttctttttggggactgcatatgctatattattgtacagttttgagggaaaatccaaggaagttgccatgccatgcatgcattcagctttatgcattgggacccatactcaatagcaagctggatgggcaggcatgtccgtgggcttcaagttgggttgaaggctacaacagtattctacgtcgtcttgcattgtagaaattttgtacggaactaggtaaatacgaaactaccgtgtagtactatacctctagtttagtagtagtatatgattagcactaaaccatgcatgaatgattaaggaatctactaaagcatgaagcatgcacacagatcaattcttaaaaacaaagtatcgtggagattccgcgtgaggttaatttcagagagcatgcattgcagaccctagatctggtctatatctttaccatatataccgtaaggtaaacttaggaatggcatcgatttttaagagcaggtataatagcagctggtatgccagcgacatactggccacgtagactggagcgatgatttggcagaaaaaaggcaggagagagagggcgagtcggcgactaaactgtcgcccggctgcatgcgtttttcgagaaaagtgggccccgtcggtgccatagatcagcagcggtgaaataatctccagagagagaataagatgaataaagaataaaatactattgtcatgaaaggatggacaaacaggttagagactgtttattgtgctggtaagctactaaaccaacttttgatgatatggtgaaaattgcagccaactgtgggcgttactattaatcttgctttaaaaggtactgatcatggagctcaggagctgagtgttcttgtcatgtaatgccagtaatcctttttttttttgcctttatcttttcttttagacgaactagagggcgtgcgtaattattggagaaaggtgaaaagtgaatcgaaccaagcaagcatgatttcttccttgtaagcatcaataattcaaaggaggctagtagcgtggtttatacacgcataattcactaggcttttcatgtctttttaaggggcgtagtaagcttttttttgctcttcttttcttcccctcttcttcactcctcggtggatggcactttggtggtgagaaatcatcataccgattcaattcattcatgtcatgagatgcaagcaaagtttggtgctatagctttccccttagcttctccccatccctcctctttagcccatagggagaaaggaagagggaaagcggctagcatgtcacttttcgcttgcttaagttaccatgcatctcccacaactcaaagtagaccatcatgaggaatgatttgtgtgcctgcctcccctgctcgtgtatgtatcaatccttagcttgaagaaacaaagttggtgcaaagtaaaagcgtaaatcgcatcatagtccacccacccacctaaagttgcaccttttaaccagcatgattagctctatcaagcctttaatcaggcagtactttttttatatattttagtgaagcagtgtttaaccatgggtggcatgagtgaaacagtccagctcaggaataaatacacacacacacaaaaccaattgaaaatggttagcaacaacaaagttggcaagctttataattgtgctttgagagcctcatctcatcccctttataatctctctctccatgggaagcaaagtaaggtgtgaaggcacctgagaggagagagcttgacaaagagcatcatgcatgatgcccaactaggcccacagtatggatggtgagggcgtgtagcaaaaaagaaggcataacctttttgggtgaaaaagaagaaaaggtcagggagtttgagacaccaatgaaaggaagagaaaggattagtcacttttgaaggcagaaagattgcactactaaaagtcatggggagaaggagaaaagagctcctgtcttttaagatgggctaattgcgaagtgggatgcactctgcagcaaagatgcccctctttgcataaagggagcaccccttctttctgtttgctagggaggggttttttggccacttaggattccttaaaaacaaatgtgaggtgccaagggaaagttggagccccataaaaggggcaaactccggctttgtatgaaaagttcctcaaagcatttttcgcagtggcttccccctttttctttttattagtcaagcataacaatcccttgctttctactgccaacacatttgctcattctttgtactagtaccaaaagaattttatgactgtactgcctctctactgttccatgtgttcataagcattaggtgcctttttttccactcaaggacttgcatgcattgcatgataacgaaaagattctccaattacaaaagaaggggctctgaactgaagtgacatgtgcaaaagcttctttcagcaacgatttgtgtcccatttctgataaacgaaaaacaatacggtccatcataagttaatgactttgtagataaccccttgctattggattgtgtttgctactactaatgaacagcccaacataagaggcagaaacaagataaaggcccagaccatttaggcctcatttggaagggccttaatccaggcccatccacatgtgatgggctgggattttgtgccttaatccaggcccattcacatgtgatgggctgggatttcgtcctatccaaacaaggcattaatttcgtactgtgcaacagagggatcagaaaacacacagaaggtgccttggaaacaagggttgcaagttgcaacactcaatatccagcaatctcgatctataattaattgagtacatataattgctaaaggcggtttaagtaacatgctggatagacctaacaacagtgattgacagaaacacggtataagcaagtgatgaagatattccacttcaaggaactgagaagcaagcagctatgcaggtacatgcattacatggttgggtcgaataattacagtgaactcggtaattctagcaaaattctgataaacacacgatatttgaccatttttgagcgccgtaaccgtaagcggggtgagtaatagatatgacatgcctgtggcctcacctgctgggaactgcactgcacgcgagctaggtttcgtaattagtagttctccacaattctgagtaccgacgaatatgttccaagagcagcgcttatggtgcccaatattattataccaatacttgcaacgacctgagattgaaacaaaaatgtcaaccacggatgtagttgacaaacaaaagaaacaaaaaagaaagagagcgatttttggtgttggtctaccacgcgatgtgcattttacctgggcagtcgttgctttattttgcctaatcttcaagaagcacagtgcaggcattatgacggcctgtaatcataaaaaaaaatgttgaaatgagtatgtttgttgctccttgttcaagggtttatctgaaaacaagattctagcagaagaaagttaccacaagtatactcaacagagatccaataagagccatcacgagacctgaaatatgcaaggcacaactcagaaatacagagcatacgcaggtttgcagcaagacagatttgatatgcccactccacattaccaagcttactgctatgacaagtttaaaatctagattccgttaaaaaaagggtttaaaatctagataaaaaagcataggaaaacacaaacgaaggttttgatttaataactggatttaacatgacaaacaagtatagtaaattgcacattagacaacatattttgactgggttgcgtaatacaaaggaattagcaatctttgagcatagaaccacctaaactgactccacactccacagaacaccagtttttgaccatttgatgggaaaaaaggtttagaagaaaaaaaatatcgcatctcaaattgcataaagttggtatttcttcgagctaactcttcaaatgatcaaaacccagttttgtggaacattttaattatagagggagtgtctggaggtgtaagcggctaacccacaaatccaacggtttattttggcctataagtgggttcgcaggttagtcacttacatctttagtgtcatgcacaaaaggtacttataagtacatgatgttttgagaactcaagtagaatataggtggttaaatgagcaatttactaaaaaaaattctttctgagagaatgcagctaagagagtttcaggaaaaatgaagcagaattaggtacatatgccagaaaattgtgtatacgtaccgaaaaatggcataagaaacgcaatgcacacggttgatgcaacaagggcagtcctcagtataatagagcagattgtttcgttcaaaaatccttcagggcgcaactcctctaaactccgagccaatgggtttaacaacagggcatatctgttgtggttaaggatcaagccatatttttttttaaaaaaaaggatgaagcaattcctatgaataattaggcaggcacataaataatcacaatgtaatcctagaagccagaacactacaagttttgatattcaaaaggatacttggtgaaagggttgataacctgaaacacatgacaattcaatggtaaatattaagaaaaaaagaacagttgcagtttcaaaaactgtaatcaacaattctcaccgtggtccacagtgcgaccttggaggcaaatgaatgtttaggaagattcagagttatttgcgagagagttttatctccgaacatgagatagccaatgatagcaaacgagccatatattgctgtgcaaattgcaaagctgcacgacatgataattttagaacattgaaacatttaattactcaacatagttaatctgcatccgaatgaagttcacacataccatataaacagtgccttagtgaatttcgtgcggtctgacattgattggtaaatatttggaaacactgagtgcccagagtagcagaaaccataaatgccaatagcaaacggtataccacctaagtttactgctttcccagtcaaatgaaaccctacgccatcagtagcgccaactaaaacgacagagaggaaaacaagaagagttgcaataacaccacccgctgcacaagaaattcaataaaccttgtcaattcaatttgctgccttaatatcattaatgatcgcagtgagaaaaatacttgaggttaagagtgttgagaccagaaaggtaggagagaacccgaagatctctcaaccatactgtaggcaagactattagagcagtcaacactccaaagaaatgtttcccatcaatatggacgccaagccaatcaaaaccaatatgagagaaaattgatgtcatattatctccttccaaaataatgaattccacacaatatgactgcatccaatgaataacatatataagataatattttttttagaaaggattgaataagataaaagagtgctcagttggattgatcaataaaaataactagatgaataccccgccgcattgctacggaaaattaagttatataatatgtacaaataatatgtaatatgatcaaaactaaaacaaattggtacaattttgagcctaaaaataattaagattgcatagttttatgagagaagaagaagagacaatttgaaccatagatgtatcatctaaaggctaaaaataattgaggtgatgtggtttaatgagagaagagagaaatagcattaactacacttagtggggatgaactatataggattagatggaaaactttgcaacataaagccaggtgaaagctacttacatatagctcagtatagagtataatctgcaaaaacattaaagaaaaagaatcagccattgtttcttctctaccagaagttaaaattagttgcacaaaaaagtctgataaagatcaatataatatgcatttcatcagtcatgaggtatcaaacattgaaatgccatattttatagtttacaaatatgccatatgcactcctttttagtgggagtcagcattttagaaaaggaaaaagaaaatccagagcttgagcaggcaggtgtttctaccagttactgaaccttaagagagcgcttttcataagcatggatcatatcatcaataatcgcatacaagcaaggttatacaaaatagaaaactaatacagcctgcacagtggtcgtgtctccattgtccaggttagtcttactctttgatacacttgcacgaattatttcgtttattaccatcaatggttgttcttacattgcaaaaaaaaaaaggaatagaagtttctacagattgtcattcttttaatttaatgaaaatccacagattattaaaaatgactttgattggtgctgagatattcggatgcaatcttgcatgcaatgcaatacaattcacttgataggaaagaaaccaggacttacagagatcagcagacgaccaatccttccaaaagcagcctcgccaatgtctggatatgtagaaataccatctttgctctcaaaacagtgtttcatcagaactccagtataacagcaaacaatagcaaacatagctaggaccgcaaggcctacccatccagcttcatgaattgtaaatggagtggaaagaagtccaacaccagcaagtacattaacccctaccaaaagaacaagtaaaacattaagcatttcttttatcttaggcaggtaattgagcaatctaacatgttaatgatagtaccattgaacaccgtctgtgtcacactgcatccttgagcgatgtagacttctccagtatgttgcgtaagtaacgagcttttcctatctattgctgaaccaagagtctttctcaagctcttgacagagtcttgcttcccatctagcttatcagacaacaagggcaacttcaggtcggatcccagactactacgaccaccatcaaggatcgagtatttgcttgtagagggacccaagtaaccaaagctcggagatgcagcaattgtataggtgtcagttgtttctctgcaaaacaaacagcatatcaccatcataatgtttgcacataacggttgggaagaaaacaaaacatgtggtttaacagctggcattcatcaagcttgggtattagattgccagcaaagcccttgtcttaatttttttgagacaaccaaaaacaactatacgatgtgtcagtacaaacaatcccctgatcgacaaagcaaaaatgattttgtacatattagtttaccatgatcagagtcagtgttaatgaaagcaaccaagtccacatcagcacagaactttcactaacaacagttggaattggcagagcaacaccaccactaaccatggcgcagtagagcacacaaatcaaacgatgtctgcacgaggagtcgatcaaacaaagagtgcagccataaaatgattttgtacgttaatagtttaccaccagcagaggtttttttttttttgaactagggcttgaaagcccccatttctattatcagaaatgcaacagtagtactctgctaaaacaagagaaaggaaaggagattacagcactcaggctgtgaattttttatagaccatagcactgtgtttcttaagcaaaatgagaggaattccaccccacatcccaacctggggacacagcaagcacagtttaccaccagcagagttagatagtgttaatggtcaaagttagtagtatcagaactagcgcaacaatatcccatcccaatcatcaggaaattgaaaacacaaccgggtccccgtcaacatacaattttcacaagcaacagtggaaactgccagagaaaccccaccagagcaaaccgcccccactaagcactaattgaacgcagtacagcagacagatcaaacgatgtctgcacggctgtagtacgagcgaggaggcgatcgaacagtgattgcgaccgcgcacgttgcggtttcagacccgtgctgtcggagcactgtcgaatcaatcagatgttctacgagtgctggtaaattctagaatccaggccactcggatcaaacatgaactgtttgcccgaactatcccaaccaaacacgtcaacgatcaatctagtattatccgaacaagcgctcagtccagtcccatcacgaaactcacaagttattccgtccagtacaattcaacgaaatctacccatcaacatgagatttcacaaacagcggttgaaatcgatagaactaccatgaaccatcaccaccaccaaaaacaaaaacaacgcagtaaacgaggaggaggatgaagcggagaatgcaacgacgtaccggtagctctgcggccactggcgggactggaacgagcgaggcgatcccaaaccttcgccgtcgtcatcccggtcgtcgtcgccgctcccgccgtcctcgtagtcgtcgtcgaagctgcggcgcgggctctcctcgatgtcgccgtcctccagcgtcatctcctcctcgtcctcctcctcctccttccggtgcttcgcctccgccgccgccgccgccgctgccatctcgcagtacgttcacagcagcgggcgaaacgcacaagtggaagcacacgaggttggaattggattgcgtgtggtggaatcggggggagagagagagagagaggaggcttcgggagagatggcgaagcggaggcaggtattgatggctgggattgggttggagtggcgcggaggcggaggaggggggtgaaataggaaggcgggggagcgcgcgtcgcgacaagctggcagaggcgcggattggtcggaggaggcgaggtgggcgtgggcgcgggggtttattgagacggggaccccagtccacgtacgctgacatgtgggggaggttgcggtggggacgttgggttgaggcggtttcggcttgtgggggcgcgtgggcgtgtaagggcccgtttagtttccaattttttttcttcaaacttcaaacttgtcttttatattgaacttttttacacacataaattttcgacttttctatcgcatcgttttaatttcttcaaatttctaattttggcgtgaaactaaacacagcctaagagcaagtttaatagtatagcccactactaactccaattcatctatagccaatctaatatccaattcatacaataattacttactatattattaatacatggtcccacctatcctatatatattgtgtcttagagtctgtgctgcagctggctatagttttatagcacgctgctcttctctctcatcatttatctcattaaaatatgtttgtagctagctaatagtctgctattgtacatgctctaatccttagggctgacatgtggggccatgtggagactgaattatcgtagcgcagttgcagaccgatcagctgatttggcaacagtgatttctagagcacggaccattttatggatggaccgagtccctactaggatgggccctaaatatcccggggaggtccatactagcagggttcggctggacgacaaatggtagacatttgaatcagctgcacatgcacaaatcagtgaagtaataggctaagggcatgtttagttccttaaaaacatcacgtcgaatctttgaatatatatattaaacattaaatatagataaaaagaaaaactaattgcacagtttgcatgtaaatcgcgagacgaatcttttaagtttaattaggccatgattagccatacgtgctacagtaacccacatgttctaatgacggattaattaggcttaagagattcgtttcacggttttcaggcgagtcatgaaattagtttttttattcgtgtccaaaaacccctttcgacatccggtcaaacgtccgatgtgacatccgaaaattttcatttcaccaactaaacaggccctaagatagcctaaaatatctcgctgatacaaccaaatcacaaattgcagtgccagtgtccagtgtccaatttccagcaagaagaatattgcgaacgatcgtctcaccgtgcaaccggcgaaagaacgatgatgccaaggatcgagttccgagacaaggcggcagcagcagcagctgggcaggtttgttccatgcggctggttgcatgaatcatacatgttacagggctccaggcgatggccactcaatatcaatccagtatcttatgttatcttgtcaatcggggtgacgtggagacgcgacggcacgagagctgatcgatcggccggcccgggtcagccgggtagcttccgccaaatcgcagtgaccacatcgccgccgaatgcggaatctctgtgtgcagcaacgggcaaacacgggatcggggtggagaaagcttattgggagaagtttgtgtttagctacagtagctttttaaacttcagtttttcttctggtataagtcagtctggctgattgtgttgtgtaactataattttttttttaatatattaatgcgtaatttttttacgcgttcgcagaaaagaaaaaaaaaagcttcttaggagccaatggcatgcgtgcttgttcggcaagatcagatcaccgccacctgcgatgatggatcgatgatcgatctgttccataataatagacgacgattatgtacagtcttcattacgcatgttcgcattggattattgctccacgattatgatgctcatgctgagtcattcacaaatcgcaaccacgatgcctatcgtcttgggctcttggccgacatctccggggtaaaaaaatttgtaccagagcattgaccacaagctaaattaagttccgatcggttaagtttatcccagatgtggttgatgtggttattggggaccacttgtacgaattatcttttatagtggagcctgacaatgggtctgacgagcctgtaccaatggatatggagaatctggatgatgggactttggagaaggaggaggggaatctgaaccaggatttggggaaggaatctggaggtgatcctggtaacaattccttaataggttctggtggtcaggttagtgagaggggtggtccttctataccggctgctcatttgagtctgatacctgaatctgatggcttgaatgtatctgatgaggaatttgatggcttagatgaggattctgtaatggttaagaaggttaatacccagcaaagtctaggggaaaagctcgctgctattcctgaagcagtaatttctctctccaggaagagcaagagaagggcaagtgacagtgatcaacttgttctccaaagagctgagaaattgaaggctgataagaatttggacaacttgcaggcaaaaggtaactttcatgataatgtttcttttttacaatttacaaatgaacaaatttctgctgctcttgataatcttggtgtgatcactttgggtacgaattttatcttagatgatgttataaatgatttaaatagtatagaggaaaagaggttaagtaaatatgttagttcttctgttaatcaggtacatacttcaaatgttgatagtaagatattagatgatcaggtggatgataattctctacttcaacatttgtgtggtgaattaatggaggaagtgatggattttagtgctgtggatgataattattctcagaccactttaaattctttagatacctctcctaatagtaagaaaaagactaaaaggggaaagaaaaaaaataatatttttaaatgaaagggttgttctgaaattgtgatgggtttaaggacccgaaaaaacataagtttatttctgatttaacaaaggaacatcaccttgattttattgccttgtcagagactattaagaaagattttagtccggctattcttaaaaatctgtgtgctggcaaagaatttttgtggcattgcaagcctcctagaggtaggtccggtggtttgcttttgggcatcaatttaattaatgttgatattggtttgattgatgagggagatttctacattaagtttcatttatgtaataaagttgataagtttaagtgggctttagttctggtgtatgggccagctcaaagtgaatttaaggatcaattccttgctgaattagttaatatgtgcagtcatgaaaccttaccaattcttattggtggtgattttaatattctacgtagccctgatgaaaagaataatgataattatgatgatagatggcccttcctttttaatgctattattgatgggttatgtctccgggagttacagatgtctggtaggaaatttacttgggcaaacaatttagcgaatccaacatatgagaaacttgatagggttttaatgtccacggagtgggaacataaatttcctttatcttctgtggtggctcttaatagagatatttctgatcatactcctttacttttaaatacaaacacttcttctttgagtaatgctcaacatagtttcaagtttgaacttggttggcttttacgtgatggctttgttgatatggtaaaggagatatggtctagtgttgatgaaggcaattctgccatggagcggtggcaggcgaaaattcgtcgtttaagacagcatcttaggggttggtctaaacatactagtggcttgtacaaaaaagaaaaaaaaggagattttagataagttggatttgctagataaaaaggcagaaactatgcttttgagtcaggagtaattggattttagatggttttgtagaaatagattatctacaattctgagagaagaggaagttaaatggtatcagagggcgaaatctaaggatattttagagggtgattctaacacaaaatattttcatttggttgcaaatggaaaacatagaaagactagaatttttcaattacatgatggtgaccaattaataaatggtgatgcaaatttgaaatcgcatattaccacttattataaaggtttatttgggcctcctgatgattctactcttcagtttgatgagaataaatttgctgacattcctcaagtttctcaattggagaatgaggctttaacgcaggtttttactgaaaaagagattaaggaggcgatcttccaaatggaacataacaaagcaccggatcctgatggatttcctgctgaattttatcaagttttctggaatgttataaaatgtgacttattagatctttttaaagaatttcataatggtactttacctttatactctcttaattttggtacgatcattcttttacataagtgtgttgaggccatgacaatccagcaatataggcctatttgcttacttaatgttagttttaagatctttaccaaagttgctacaaatagagtcatgactgttgcccaaaaggtaattagtcctactcaaactgcttttattcctgggagaaatattatggaaggtgtggttattttgcatgaaactttgcatgagttacatcgtaaaaacaaaagtgctgtaatttttaagatcgattttgagaaagcttatgataaggttaaatggtcatttgtacaacagactttgaggatgaaaggcttctctcctaaatggtgtgagtggattgcctcttttattcaaggtggtcatgttggtattaaagtgaatgatcaaactggtaataattttcaaacgcataaagggcttagacaaggggatcctctatctccaattctctttaatttagttgctgatatgctagctttactaattaaaagagctaaatataatggatctcttcatggggtggtttctcacctagtggatgatggtttgtctattttgcaatatgcagatgataccatcatttttttagagcatgatttacaacaagcaaagaatttaaaattgattttgtctatctttgagaaattatctggcttgaaaattaattttcacaaaagtgagttattttgctttggtcaggcaaaggagtgttataagcaatattctaatatctttggttgtaagttagggtctttttcagttaaatatctcggtattccaatgcattttagaaagctatgtaataatgattggaaagttatcgatcaaagaatagagaaaaaacttagcagctggaaaggaaaacatatgtctgttgggggtagactggttttgattaattctgtcctttcaagcttagctatgtttatgatatctttctttgagattccgaaaggggttctttaaaagattgattattatagatctcgtttcttttggcaaggagatgaccataagaaaaagtatagacttactagatgggatattatttgccaacccaaagaacagggggggtttgggggttcataatttagagattcaaaatagatgtcttttgagtaaatggttgttcaagttaataaatgaaaatggtgtttggcaagacttattgaagagaaagtatctttataataagtctatcacccaagttgacaggaaacaaggtgactcccatttttggtcaggactcatgaaagtcaaaaaaaactttcttaactatgggttcttggattgtgaataatggggaacacataagactttgggaagatagatggttaggaaatacggcctttagagaaaagtatccatctttatatgctattgtcagaaggagaagttcttctgttgctagtgtgatggcttctgttccgctcaatgtttcttttaggagagctttagttggtcaaaatttaacactttggcatgaattgtgtgcatctattgttcatattcaattgaataatacttttgattattttagatggaactatcatcagaatggccaattctcagttagatcaatgtacttagccttaattaataatggttacattgacagaaataagttaatttggaaactcaagatgccgcttaagatcaagatctttatgtggtatttgcttaagggagttgtgttaaccaaggataatttagcaagacggaattggactggtaatttaagatgttgcttttgtacgaaaatgagactatccaacatctgttcattgattatcattttgcaaagtttatttggagggcagttcagttttcttttggtttatatattcctactagcatatctcatatttttgatgattggcttcagggagtcataaacaaaaagagcaaactgatacttgttggagcttctgccttgtgttgggcactgtggctgagtaggaatgatagggtttttgacaaatcacctactattacttatatgcaggtcattttcaaggcaacatattggcttcgtctgtgggcacagttacaaaagtgtgatgaagatgcagatttcttaattgttgcatgtcgtaaggttgaaacgacggttatgcaactgtttgccaatcatggatggagatttaccaatagactggaataatgttattttgtctagtttggttggtgtgtttgcttctatttgaacttcactcttacagagtgctagtgtaacgctccgcttttcgtgagtcgttaaaaactaactcggcaaaatcctaattacgaaaattttcgttctttgtgtgagagtctaagttgtgccagggatctcaatttaatcccgttgttccctctcatcgaaatcaaaatcctccacctcgaaaattcctcttccgattcgagtctctgaaatcaaattctgaaattcaaatccttcctttgaatcctcaccaaatacttctacgaatccagaattattcaaatcccgcctcgaatcctttccttgactccaccctatgttcccgagaacaaatacccaagtattccttttgaatcttttccatgacttctccttgagtttcccttgatacatccctaaaccctcaagttcgaatgtcaaatttgaattcgaatccaaaccctaaatatctacaattctatccaaatcggttttctctgtaaaagtctactttacctccctgtatttttggatggaccgattttctcccccggcccatctcccctcccagcccatcatctttccccctcgcacgtgcgttgcacgcatgcgagccgagagagagagccgtcgctcgctctctctgtttctctcgctctctcgtcttccttctctctctctcgttttctctctccctctcggtttcactctcgcgccgacaccgcttcccgccgtcgccgcccaaaacctccaccgccttcgcccattaccgcgcgcgcctcgcgaggtggccgaccggccggtcgctgccgacgccatgcgctgccgccttgcccccgctccatgccaaaccgaccgccgccgtcatcgtcgacgtcatccatggcccccccgccactccacgccgcacccgtccaagagtgggagaagcagctgctctccctctcctcctcctcctcactctccctctcctcattatggcaagagaccaagcccctttttccccttctttttccctttcccgaccactgccggcgtcaccacctctgcgccgcttgaccgctcgcgccacccgcctcatctacttgaccacgccagcccgcgctccagcggttcgatctccgccgctcgatccaccgccttcgtcgcccaaagcatccacgccgtcgccgctttcgcatcgtccacgaaaccgccgctgccgccagccgagctccccttgaccgccaaggtcagttctcccctccccaaaccgacctcacctccgctataaaaccaagccaccccaaaccccttcctctctcgttttcactcgcctcagtcctcacacccaccgcgccattgccgccgaaccaccgtcgccgccttgttgctgctcgtcccgctctcgccgttgtcgtccgttgccgagcaccggaggagccggtgcgtgcgtggacgcgtgacgaggagctccgggcaccacctctccctcccttcttccccggccgcgccctctcagtgccgtgccgcctcggcgtcgcgaccacctcgccgcgacaccgaccgcgccgccaacgctgcctcctcttcgttggtgagctccccaccataatcctcctcctgccgtgcgatgcgccgcgcccgccgccgctcgccatagctcgccatgcgctcttgctctgtcccggaggccgcctctcgtcgccagccaatctcggtgccgctccgtccaatccgacgccggaaacggattccttgaaccccggagatgctcccacccctttgaatcgaaccctcgtcgtctcgtcgtgttttcccctttttgctctccggtggttgccgcgccgcaatccatcgtcgtcggctcctctcccgtcgattcctctcgctgccacgctcccggggatccccttgacctccccctggctgccccaaggccgtcggtcttctcccttgtctccgcgccgtgtcgccgcttccgccgccgcataacgctgccgtgcgtgcgccgccggtgaccatcgggtcccgcgtcaccgcgtgcgcgtcgcaacaccataccggttcggctaagcccgagcccgcgcacccttcgctcttctcgcgcgcggccacgtcggcgtgccggcgagattggccgccgccgccggccgtcgtcgcgcgtcctcttcctgatccgagccgtggaatgagttccccttctcctcctcctgccgccagtgctagccgccccttccggctcgccgccgttcgccggatcccgccgcgcgccgtgggccgtccaatgagccgcccggcctcctccctcgcccgtgccaacgtggctgtccacgaggacgccacatctacctgcccggccccgcggagaccggtcaaaggtctcccggtccaccgatccaacgcgccgccttgcgtgcaccccgctcgcgtgagccgtgtcgtcgccttgtgggtcccgcctcgcgcccgactcggtggaccgcgtccatcggcttgcgtcgcgtgggccgcgcctcgttcggccttgggccgcctccctcccgcgcgccggcccgctcgcctcggccgcgcccgcgcatctcttcgggccgcgccccttcgctcggcccaagtccaattaacatccctccatccttttctttttccagggatttaataaatcctttttcctttgtcccataaatcaattccttattccaaaattccataaaccatttcctttggtcccgcatgacagtgactgtcaataatattcttgagaatattatttctacaaattccataaaccatttctcctattccagaaactccaattaaacttccaaaattcatatcacccaattcgcaactccgattgactccgctcaacttccagtattcccataaaattgagatctatttaatggcactactaattagtctaaataggatctttcttttggtcttttgtttaggttttcgattgtttgcgtatagttgcggttaccggattttcgtcgatcgcgggttttcttgaagattcgtgaagcttcgtgaagactttgagcaaggcaattcaccctttgatcaattgcccctataactaaaaagtcattattattttgtttgcaacttgcattattagaatcacacacttaacttgcttggcctcggtttgcgtgccaaaccgacggacctacccagtagtcgcactaattcccgtaggtcgtactaccctgattccttgtcgctccacccttgtggtacctcggtattcgtgttctctgagcgcgtataccaaatatcccacatacaccgctgtttgtcgaaaacttggggaatgggtttgagaagccttcaaaacccgacatgtggtgtcggtgtgtttgaaaataaaatgaattgtgaaaacttgcgatgcgggggttgtgcctatgtggcactgtcccgtattcgcatataaggaccgattcctgtgggaaactcatcgaacataatcaaagtgcaaccacaaggtggaatgggacaccctggccaagtaactagtcggttcagggaaacctcgcatgccaatagttgggaacgccgggacggggtcggttggagccaaaccgggttcctggtaatgcaagaacgagaagcttgctgaattaccgatcgaggtggttggggtttgatttgtgaacgcctaaaatggcctatgtttatgtgaggatttgatccttctatgtggcatgaggtatccctgggtcggcttgggaaaggctttgtcgcgaacctctgacaccggccagtgtctagagtaagttcgtgtcttgtgggtaaagtgtacccctctgcagaggttaactaactgttcgaacagccgtgcccacagtcatgggcggatgtgaggtggttcccattgcgtagatttgtttgcctgtgctttgtgaaaagttattgtggtgtgggaatcgtaaccagaatcagcctatgtggcagatggatgacctgagtggtcagaaacgaatctgtgtgattcgggatgtccgtgggcatcatagactaggcttcccgagtggaagcggattgctttgctgctgggcagctggactctgggagtccaagaaaatgaaaaaggctctgggagccgattaatcaagtggaatggctctgggagccgagaagtaatgatctgacccgggaggtcggtacattactaaatgagctgttgaaaaacatctcttaaagtcgaatcgagacgcaagtctcttttcggcccaaacttagaaagaaataaatcacttagtgatttcaaaaagtcttcaaataaaagatttgcaaaacgaccttgcctctcttccaagcttgcattaaacacctaagttcccgtgacttgctgagtacgaaagtactcacccttgctctatataaatatatatatatatagttcctccgccctgaagagaagataaagtgaagtgaagattagggtttcgtcctggttcccagccgtcgcctgtggtgttgggtgttagaccgttggttccgctgctgctgttgttgttggtgttcgcctcgtccgtgtcgtcggttgtattctcgggctgtctgagctgcaacctaagttaaggtaaataagtcatctatttattttaaggattgctatgattcatatttgtcaccgtgggtaccagcactatgtcctgggactggtaccgagatcgcggtttcgtaggaagcggttcacgccgttttccctacgacacgctcctgtcaggtgccgttgtacggcggtatcagattggggtgtgacagctagtttgtaataattagctgtagctctttcgagtaaaggccgggatgctatttcattccattatctaaagaaaagtttatccgtttggtaatattgtagtacgagttaagggtgtgttcggaggtgggtgttgggaaccatctcccatgcatgaaaaacggagctatccattaacacgtgattaattaagtatttgttaacttttttaaaaaatggattaatttgattatttttaaacaactttcatataaaaacttttttaaaaaagcacactatttagtagtttgaaaaacatgcacgtgaaaaacgagaagaggggttgggaaactatagtagtaggactcaattatccgtacaagtagcgtgtgatgcaggggaggaatagcgtgctgggataaaggccggcgaagcagacggctggccaagcccaagcagctagcgtgcgtagcgtaacaacgacgtcgttcgtccgaggcgccgcgcgctggcagggcgcagcacagcgaccggcaacgtgtacaggcgcgaggctgatcgaggcggcgccggattgggccacacacacgcttgcatatcatcgtatcgtgggccatcacgtggcggcggcgccatcgatcctgcagagccgcggcccgcgattcacctgggctagccgcgaaccaccccgtgaactagcggcaccgtcctgcccaggccgccgcgccgcgtgcacagcttgcgcgaaagaacgagcgcatcgcaccatgcgcgcgcgtggggcgcctctccacgagcgacggctgatgagtcgcccacagtcccacatgcatatccctcccctacccgccggccgccaccctgcgtgccacgcttgtatggagatttgataatttgacacttccgttttcagagtctcttcttgtgatgctgtcgtaaacctggcgacgatcgactacgcatagcagggtcgttttagtgcttacgtggttagcatgtggtttctgtcattttttttactttattccttcttaatatatttggatggtccccttggccttaaaaaaaagaaaaaaatatttaatatcctaatctacatttatttactatgatctcacaagtcactctcaaaaattaccaattaaagcaagtcgacaacgataaaagtgccaaattatcaaatttcttgtagcaacggatatttgatacgcagcccagctgattgtatccatggtttgttaccaaatggaacagctcctcattccacagaccacagcacagtatatatgttcaagagagagagccacaaaggaggcacaacgtatgcacagtatagatgttaacctgcagttttggccacaaaaatacattgcacaatacaacgaaatgtctatcagttaaaagcaaaaaatagccgccctaacgctttacagactcccaaaaatacagactgcctttacgtttgatctttcttcagttcttttacgctctttctctgcagtcaaatgtaagggtgcggccgtttctaagatctcaagaatgttacaagcacagacgtgtatatctggatgtacaagttgccaacgcctaaaacatctagtcaactcaaagcctcgatcccttcgtgaattcgctgcttctccatgttttttagtttccaagttaatgaactttctcatcaacaattggacaactcgtgccgtcgatccaacagtatatggtagtatagcaatggttaactggtagcagcagagttagcagaagcaatggctgttgcattttagaccttactcacagggttcagctgaaaaatctggctcatccggctttcttagcttaggcaactctttcatgttctgaggtcctttcctactcccactcatgatcttcatagcgagattctgcttaggtggcgagtcatcttcaccatttgagtcatctgatctcatggagcagaatgactccctcatgctcaggtcccttgccatcttcctcctcttgtatcgccgccaagcagcttggatgaagcatgaggcccaagttctccagtggtgcgagtagtaccggaaagtgtgttgcaatcttttgctgtgcagacgcctgaattggtttgcaacaaacttgagatcctcagcttggagtgcgaatgcctcaacttctatgagtgccttcactgtccgagtggatgacggcaaattaacagtaggtttggggacaagagcccacccaagcagttcctcgccgcagaaatcaccggatttcagggtagttgaattgaagaagccagtgcggccaccatttgttgtagagctttcgagtttcccacgaatgatgaagagcatctcggtcactggatcaccctcacggacaatgtatgtgccctgtgtgcacaacgatgatacaagacgctcacagatggcgtccaaaagttgattgtccatctgggagaagaaaggaacctgaaatattgtggtaggtaaagacaaaattagcacaccggtcaagtataaggcaaacctgtagtgtaaattgcccaagaaatgcatttttttaaaaaaaagaagtgtatatttggacagtttcaaaatagttgtttggaatctccagaatatttggaccctgcggtaactatgcaaactaacaatctcagactgcctatttctacacttaattaggatcaagggccatctattgtcaaaacccggcaccactagcttaactaggatcaaatagttactgctgctatataagaatccaatcacttctagttcattgtgacattgccaaatatgatgctaagatcaattctaatataaatgaaggaatcaagtaattgcaaccagtaaatattccattgatgaggtaggtcaaggggcaaatttagtgagtacatgagaaactccaggtatatactgagaccaaaacagcactaaaactaactatatactctaataatcttttaaaagagaagaggaccagtatatacaataactttctagtaccattcattgcttaaaagaaaaacatcaaaagatcgcacaacagtttcaaatatttacttgggtgtattttataaaagcatgcaaaagtatttacccggcgaacaagacccaagcaaaggtgacgtttaatgtcacgacgaagatctgcaggaagagcctgtaatattgattcttcattcactcctcgagttgcgagccacttgtactggataaaccgtctcaccctttctcgtagttcatgtgggagttgacgatgcctcatccactcctctgtatctctttgttttaatctccattcctcaaccctcacagtgatagattgcaagtaggtctggaaaaatagtagcagtgtataaaaaagtgccaaaagaatcaatcgtagtgtagacatgatcactaaacatttaaaaattacctgtacatttccaatcaaatgtgcaaacaagacgagaccaagtactgccaagaatatacagtatagagtctcaccaatataggtactcacagtaatagtctggccatagcaactgttgcaaaggaagaggaggatatagctcgttagaaaatgaatatagatcttgaaaattggtaaagtaatgatcccattaaaagaactaggctaaacttccatatttaatttactgctttgcttgacacaaaaatctccgtgattcccatgaaatttctgaacacacacatttcacaaggaaactgtaaactaagttccttcttatagcgctgtagtttgacacgaagatgttttgacaaggaaatacctcagattctgcaaaccccaccaaagggaatagaaatacttcatcaagaaacgttgccctggggcttgattaaacaatgcaggctgaaacatgccataatcaaaactgattgaagtgttagttgcgtcacaggtattgaagatagcagttttgcttgcccagttttgatttggtatcacatcacaatctagaaatttaatatcacagccagtttcattcttgcaattgctcttccagcaggcagtttggcgatcgacagatagcaaataccatagagcacctagtacctgaaagaagatgaatggagatcgtgaaaatttggagacattatagctatggagttaaagacttgcaaatacatctaattcgacatttgctgaacaccaatatttgagatgtagaaaacatttcatgtaaacgcttacgaataccatacatgactggctatcatgtaaagcaacatattgtatgcagccccttgccaagcagtctttgcgacaactccagtagttttgacaatttcataagtcaaggggaatatgaggtatagtcttggaaaatactgagcaagaactatcagcaccagaatattgttgttatgctcatcagtggaatacttaatagctggtatcacaaaccagattaagatctgcataaatgtaaagatacataagcagcaggcaaagtcaaaatcgaagattcctccatttgaaggaaagagcaatataaacagctgcacaaataaaattcagttatttagtgcttttaggtttgacgatgtacaaaattgccctatgaagcatagagaacctagaaatcccgatgagtaagattataaccattgaaaatcagctcaaacaaactggagatgctatggcaggttgctgcattttggagcccattgtagtaaacttatccagtggaacattaatatgaggttcaattttagcttacaggaattcacaagaaaaatcaagagacaatacatgtggtcggcactgatggtaaaataatagttattaaattcataatgcatcatatgaaaatgtttcagtttagtgattggctcttaaactatgaagaatatttgccaagattgaacatgatgattccctaggattttcatgctgacttagagacaggatgattgagcaagtgacacttttttttttttttgagaatacgcagaacatgcgtatcttttgtattaagcgaggggaaaattattttgtccttagtgtggtctgggcagcactaacacagttacaaatcattatttatccacaagatactatagtagcatctgctgtaaagaaacttaattgaggtgatccacaatagaacttcacgattgatattagcacagtagcatatttatgtccgcatgcagataaatgaacataagacaacatcagagctaacaaatatactcagttatgaaaacgacctaacaataatgatcattaatactggttatactccagttgacaagaataaaaggaagagcgccaagttacctgtggtaaaggcaatgcagccactgcatcgactacgaagtcagatctcaaatattgccacgcaatttcctttggatccgtgataaggtctcctcttccaaataccctcatggttgagctcggattaatatatgccgttctaaactttattataatgtgagtgaaatatagtaaatcagagattgatcggaagaatgtaacagtgatggctaaatgcctgtctgtcccaatacacgaatttggggtgccataggagatttttggcacgtagaagtacagagggtctataaatagagcaacgaagcacgaaaaaaggaaaatgtggttccatgtcaagatgaagtcacttgatgggtccaaaatccttttgtaccacagctcttctcctggcacaaaaattttgttctttcctgagcttgccacaccaagtttactagcagcgaaccctgcctgtttctggtgagttggtatagttggttttgccttctcatcatagaacctgtgaattacagcctcacataaatgtttgaactctacatcatgaatattttcgtatgtccatccaaaacagtgaaaataagaaaaataatgttgggaatgaaatagaacctcccattgtaaactaaatcacataaagaactgacagttagaacagtttttgtacattaacacaatttaattctaatatcaattttggttgaagccctatatttcttatccacgaaaggttaatctttcctggccagatcaactaaaagggatgaaaaccttcatcataccatgctatagaataaatcgaatggattaatttgggttcttaaaaggagtctatgctctaaaaaacaggtcaaatacataaattgtttgcagagtaacaggaaattagaaagctggcacaatccaggctaaagcgtccttcctcctagaacaacaagaaaaagctcacagcaaatgccaaatcactcgcaggtcgcagagcctgttggatctctaagagctgaaaagctaaaactagaccaaagaagagcttttgctttgctcgtgcaggctcacctcacggttctctgcctcttgagcgccatctcatcgtccaccttccccgccccaaacatggcatcagctacagcgagtcagcgagcaagaactcgtcaaccacaccgcgcagcagccttggcagcttcaccggccgaatctggcggggaggcggccaaagaccgatcttctgcgcagcatcggcacgaggagggtggtcagcgcagcggtggggatcgtagagcctggaggaagcagaaactcctccccgtggatgctccccaccttgggcttaattactttattagtcgccgctaatcgatggctttgggggttagtggtgcacttgttactgtggttaatggtaagcaagcgagagttgttcagattctttttttttctttttctttcttctttggcgattatcagaagggagagatgagaaggtgggtggtaggtggtcgtcgaggcgaagaagggtatgagaaataaaatgagttttttttctgatccgaaatgatttaactgaccggaaaaagaacactttgaatgtgtagtagtagtagacaagactataaatagtactaggcgaaagtcatcagcatccatcaggtcctggctgaagaaaaaaagagcagaaaaggccgtggaaacaacgggtggcgacatgttgaggctaacggtttggacccccaatgacggcatctgtcagaggaaagccgtgaggtgactgaggtgctattgtttggttggttgtcttgccatctctagatcgctggcatgtttcagccgagctgctgcaggcaaatggtgtggcattaaccatctggcatatgcgatgctgctgcacacttgcctagtactccctgcgtttcaggttagggtataagacgaaagtgctttaaatttgattaagtttgtagaaaaaaatagtaacaattttaacccaagaagaattattatgaaaatatatttaattattgatttgatgaaactaatttagtattataaatattactatatttgtctataaacatagtcaaacttaaaacagttcaattttaaccatagtcaaaatatcttataacctgaaatagaggggcagtagctatttgtccccaactccccgagtggtcaccgcaaaatggcttgattagagctagaggtcaacgaaagcgaatggacggacaaacacagacacaggtttgtgcaaagcgaatggacggacaaacacagacacaggtttgtgctgcttagtactactgcatgatgcccgcggctcttttgacccttttttctgccgtggtgcgtcccaggaagggcagcaaaaaggaccagattccgtttcattagggcacccgcaatgattatctataggctctctacaagagatccatgtcagcatattttcctacttgaaagagattaaatgaagagagagcaaagctatctactaacctggagatagtttatagaaaaaaaaacgaggcaatgcattagagagttatagatacccatatagacatactattgaggtagtttactttaatctagtctattgctgagatgtacatgttttatagagaacatcttactttaccattgcgggtgctcttagtactgcaaggagtcaaggactactactagtgttgcattgttgctcgtctaaatcgtaatgattttggatgacgaaaagcgcatgatcgatcgatccgttggaccgagcgtgacacgctaaaccgcatagcaaaagcagatgccatagacacagtcactcagatatttacaagcagtgccttcatggtagtatacaactacctacgtcggcgtctccgagcgctgtgcactgtcgctgcagcaaacgcctcgcgcgtgcgcagaaaacgcgcggcgccacacacgggcgggcggggccgcgggcggaggacggacgggcacgcgattcgcaagggaagtttcccgcggacgcacggacgggaggggtgatggcgatcgcgagcaaattgccgagccgaggacgcggcgcggccatctgcggctatgcgcgttcctggcgcgcgggcgcacgaggggaagtccacctacgagtcacaaaaagaatggagggatctcacgcgcgtccacgtcgtgagtcgtgacgtgctctccttcctcgggatccccaccggcgcctcgtgcgcacgacagctggggaatagagaaactggacttggcggtggcgagtgggcgactctgcttgttgtttatgcactcggaggcagctcgattcgctcgtcccgtgctggcggttaaacaatgttcaaaaccaactaacgaatcgtcatctggtacaaactagtactccctccattcctaaatgatcttcgtattaccaaaaataaaagttccaatttgatcatcgtatttcgttaggaagcggcagaaatcatggacggcgcttcgtattaagcagcactgcatacaaagttatgttgatcgatggggtagtaactgctccttgcttttgctggtgaaataggtagatcatttaggtggtgtttgggaacgagggactaaagtttaatccctctccaccttaggaatgaagggagtactactccaccttatgcactcgtagagcctggaggaagcagaaactcctccccgtggatgctccccaccttgggcttaattactttattagtcgccgctaatcgatggctttgggggttagtggtgcacttgttactgtggttaatggtaagcaagcgagagttgttcagattctttttttttctttttctctcttctttggcgattatcagaagggagagatgagaaggtgggtggtaggtggtcgtcgaggggaagaagggtatgagaaataaaatgagtttttttttctgatccgaaatgatttaactgaccgggaaaagaacactttgaatgtgtagtagtagtagacaagactgttactagtactaggcgaaagtcatcagcatccatcaggtcctggctgaagaaaaaaagagcagaaaaggccgtggaaacaacgggtggcgacatgtcgaggctaacggtttggacccccaatgacgacatctgtcagaggaaagccgtgaggtgactgaggtgccattgtttggttggttgtcttgccatctctagatcgctggcacgttccagccgagctgctgcaggcaaatggtgtggcattaaccatctggcatatgcgatgctgctgcacacttgcctagtactccctgcgtttcaggttagggtataagacgaaagtgctttaaatttgattaagtttgtagagaaaaatagtaacaattttaacccaagaagaattattatgaaaatatatttaattattgatttgatgaaactaatttagtattataaatattactatatttgtctataaacatagtcaaacttaaaacagttcaattttgtacatagtcaaaatatcttataacctgaaatggaggggcagtagctatttgtccccaactccccaagtggtcaccgcaaaatggcttgattagagctagaggtcaacgaaagcgaatggacggacaaacacagacacaggtttgtgctgcttagtactactgcatgatgcccgcggctcttttgacccttttttctgccgtggtgcgtcccagaaagggcagcaaaagggaccagattccgtttcattagggcacccgcaatgattatctataggctctctacaagagatccatgtcagcatattttcctacttgaaaaagattaaatgaagagagagcaaagctatctactaacctggagatagtctatagagaaaaaacgaggcaatgcattagagagttatagatacccatatagacatactattgaggtagtttactttaatctagtctattgctgagatgtacatgttttatagagaacatcttactttaccattgcgggtgctcttagtactgcaaggagtcaaggactactactagtgttgcattgttgctcgtctaaatcgtaatgattttggatgacgaaaagcgcatgatcgatcgatccgttggaccgagcgtgacacgctaaaccgcatagcaaaagcagatgccatagacacagtcactcagatatttacaagcagtgccttcatggtagtatacaactacctacgtcggcgtctccgagcgctgtgcactgtcgctgcagcaaacgcctcgcgcgtgcgcagaaaacgcgcggcgccacacacgggcgggcggggccgcgggcggaggacggacgggcacgcgattcgcaagggaagtttcccgcggacgcacggacgggaggggtgatggcgatcgcgagcaaattgccgagccgaggacgcggcgcggccatctgcggctatgcgcgttcctggcgcgcgggcgcacgaggggaagtccacctacgagtcacaaaaagaatggagggatctcacgcgcgtccacgtcgtgagtcgtgacgtgctctccttcctcgggatccccaccggcgcctcgtgcgcgcgacagctggggaatagagaaactggacttggcggtggcgagtgggcgactctgcttgttgtttatgcactcggaggcagctcgattcgctcgtcccgtgctggcggttaaacaatgttcaaaaccaactaacgaatcgtcatctggtacaaactagtactccctccattcctaaatgatcttcgtattaccaaaaataaaagttccaatttgatcatcgtatttcgttaggaagcggcagaaatcatggacggcacttcgtattaagcagcactgcatacaaagttatgttgatcgatggggtagtaactgctccttgcttttgctggtgaaataggtagatcatttaggtggtgtttaggaattaggaactaaagtttaatccctctccaccttaggaatgaagggagtactactccactacttactctattactcactccgtcccataatataagggattttaaatttttgcttgcactgtttgaccactcaaaaaatttatgcaaatataaacgacgaaaagttatgcttaaagtactttagataataaagcaagtcaaaaaaaataataattctaaaattttttgaataagacgagtaatcaaatagtacaaacaaaaacttaaaatcccttgtattatgggacggagggagtactacaaatcaacgaatcgtcatctggcgcagtagcatactgaacacactcgttggttctgtttagaaatcgatctcttgttatctagttcatttggcagtgaggttgcctggttgctgattggatattcaggcgagcatcttgtgacagatagacactgtgatgaggggagtagagtaaattgtgtttacgaagaagcgcgtcatctgacagtcactagcacaagagcacgactgctttaacatatttgcacgccaaccttcactagattaatttgatttatctgcaactagacagcatctcttcgtttgctaaacgtatcaactactagtatcagcctgatactagtagttgatacgaaaaaaaagcaactctgattagagccgtgatagaggccagggtagagaacatgtgggcgtgcgctatcgtgtggtgtgcccgtgcaagaaattataatggatatgaaaaaaatccgaccagggtttacctcttcttgaggaaatatcccaagtgttgtattgttaacacatctatttggttacgcgagaggtatctcagaatatcatatttgaccaaagaaagaaataaaaggaagcaagcacagacagttatcagcaagaactccgattaactataccatacgtccataactgactcaggaacagcaaactcacatccaaatctcttccaggaaacatttctttggcttattttgagctaactttgttataggaaaaatataatcactagagaggacggaacacaccgaacatgggaatttcacaacatctagtggtaggggatgctacagcttctctagtttttgatccagattctgagaagctatagttatagaatctagaaaataaactagaaaccagaaactgggaaacaaagcttcccagattctgagaaattggctaccaaccagttgcttctcagataagctccccaaacagaccctaatttatggtatggatctctacggttccagaaccagacaagcaacatatacttagtacagatatattagatgagtgacgtacagcacataaatatgaaatggatatgaactgaggctgttattagctctaggtcaaaagagtaattcacaacaattgagacatgaagtgctggccacttgttctgaacggttgagatacaaataaaagtaataaaccacataaacagaaagaaaaaaaaaacatattttgtctaatggccgccggtaggaagaatgcagaacgagaatatttcatctgaaggtcccatatatagaggctactattatggcgatgcagtgcaggaagaaggccgacagatgcgcagagtgaaggaaaaaccagaaagaataaagccaaggggtggagtcggtggaaccgcttaaaaggtagtctctgcctcttgcggaagccaacccagcaaattccttttgtcgctgaattacaggctgcagatgaatgcgatgttttaacccaacgactgacatgaagatttattttgctgtatcaatctcttgatgcatggttctattaaaaaaatggtctatttacttgcacgagctgcactaatcactagttagtattgctcaaaatgttatcaattttatgagaggaaatatgttactaatttgtgacgatgcagcatcttcaacgaagagtgccaaccacaacgaggcatcataggcaggaaacaatggaagattctcttttgcttgcaacttcacatgaagcaggcaacacgctcgaggaatgaagagtgcagaacaaaaccatgcagacagagccggtagttggctgagtcgcttaagcagaatgatccctctttagcacatagtagaaaggtaatatgtcttagttgcatattacatccatcccataagttttttaacgtcagaaataagaggctgaaatatcaaggcagataaagtagtaaaccttaattgaagtcaatcagttgatgccagtcttaaagcattcatggcatgcaagccaaagagcagacggtcaagcacaggcatcagggtctagctcctgctacggcggtacctgccaccatctcttctggaaaaaaggtgaaaagcaggcatgcataagaatgataaagaatatatgatttataaagccatacaagacgagaattgtaaaattaacaaaatatgccttacccatcagcataaggagaaccacctcggccacgtggtgacctgctgtagctgcgcccacgaactggtgaaacactgcggcgccttggagagcgatcacgaggactgtagcttctgttcgcagaataattagctcagttcctttcttttacatcatatattacaataaattcaacaacaaagtaggtgtttaatagaacaagtggattaactgcaagtaaaaagtggatcacgcgaagcgtattatgagacaagagttattgatgtgtaagtccccacctttaacacaaaatatcaaaaaaaaattgggcatggaaaataaagttgacaccaaactaaccatactactatatttatatacaacattgagcactataaagttaccttctaccataggtcgggctcttgcggtattgagggctgcgactgcggctgcgactcctgctacgacgctttccactacccagacctccaggaccaatacgcaaacgacattcacgagcaaagtgcccagtttcaccacactcatagcacttcatctcagacccaccatgtcgatcacgacctccgcggctacttgagttccgtgagagctcaactctccatccattcttgcctattaaaagaggaaccacgcatttgaacaaatcctgataatgcataaattaattctaactacacagggacaaagcttgcacaacctatgaagatgattggtcaggatgcattttaatacaataggataaaagaaattcaagaactcgagataagagacattgtcaaacagataaaatttcctggccactcaaagcaggggtgggcattcggtctagaccgaaatttcggtccggttagttcggtcttttaaaaattcggtctttggaaacaggaaaccgaagttgttaagcaaaaattactaaccgctacttcggttaaccgaaaattcggttcggtcttcggtctaaaccgaggtgcccgaaccagaacgtgcgtcctcttcaatcttctcgtcttcttgctcctgaaaacctccatggctccacctcagtcacatgggacggatatccactagcatggtgacaagtgctggcgggacggaaggcgacgacgcggcagaaatcagccgcgcgacgcagacggcacgcgatggcgcagcggccggcatgcggctgtgcagcaggatcagcaagccagcagcctgtggcctccttatggcttccacgtgaccacacgattgcatgcgacactgcggcgacgccggcgagcagcagcatgcggcagcactgcagaagatggcggcgtggaaggaaggggacatgcgatgcgacgagataagtggtgcgccggcggcgcgtggcctaactagggttaggagtgcttcggtcaatggaatggtggggtcatggggattgggtcattgacgtggatttgggcctcaccttgttgttgggctgttttggtccataggatggtcacgttgtctgcttagtgattgtattgatttggtttcttcggtcctcggtttcttcgggtagtattgcacgatgaccgaatctttcgaagtttgttcggtctttcagatgtcacacccgaacaaatgaccgatgcccgagagttcagtcttttcgggttcggtttcggttttttcgggtttggtcttcggttatcggttttaatgcccacccctaactcaaagcttgattcaaaaagagcaaaaaggacaagaagtctacctgtattgctaatttgacatataaaaggtcatcaaaatagaacaaaagaattttctgacaaacttcagacagtgtgcagaaaaaacaccgttacataccatctaaatcacggagtgcatcctcagcatccctcttgtcatcaaaatcgataaatgcaaaaccaggtggtttacgggcaacccagacactgcatggaaaaatacacttgaaaattacatcaacaaacatacccgcaacgtccaaataacttatagtacaaggggtaccactatattgagtcaggaatagatggccatccaattagctaagaattttttattaaaaaaaaggtaaaaggacatagagttctgtcacacttaaaacaacacatatcatcaatccaaacgtaggactatcatgggatgcactattttcctcctggtacacgattaatgaacttctgtcactaaaataccataagactgatgttataatgcaagcagaatatagttgcatgaatatgcacaagtcagttatggcattatgcacagctgggatgaactattacccttccggcacacaattaatgaactagtctatccaaaaactacacaagactaatgcagcacaatgcaaaaaccaaacacccaattagatgaagtggaaaaattgcctaggcagaaactgaccttcgcagaactccaaacacacgaaactcatcttcaagttccccggaagtcactcggggatccaagttgccaacatacaagcgggccatcgtgaacaaatccctgaagtaagaaaggaaccaattatagctcttccctaaatatatttctacatgaatgcaagaggaccaaaagataaatgttacaccttcagaccataaactatgacttgctacaagctaattcaagaagcttttcaagctttttactaagagtgcagttctgaattcatttcatccacatagtagtaaagagctaggtgtcagaaatctgaagctgatcgacacaacatgaaacagccataatagtccacagtatcgactttggagattcttacctattgcagtaatccttaacccaacctcggacctttcaggtttaatcagtactacctccgtcccaaaataagtgcagccataaatatgcgtgctcggcgttttgaccatccgtcttatttgaaaattttataaaaaatatttaaaaaaatagtcacacataaagtactattcatgttttatcatctaataacaataaaaatactaatcataatcttttttcaaataagacgaacggtcaatcgttggatatgaacagtgctaaaactgcacttattttgggccagagggagtatgagttaaaaagaacatatatcgcttaaagtgaagcatcacagattctccacaggacagcaacacagaactaacaacatccaatttcatacccttgcgcacaaaccaaaaatagcccaaccaaaagtagccctaatcgagagccgcccaaaaaagaaaaaaaaatcacatcccgtcacgagatgagctttcctacggttcctcaactagaaccggctgacggatcgaaccacataagcaacgaaaccgacggaatcaaagtggagatgggtttctagggttccgaaagcggaggggatcgagggtcgtggacactcaacgcatgaggtgaaacttcaaggtgcatggagttacctgcgcgggaagggtgcgagcgacgatggcgtgtggacttggcaccggcaagtccccgccgcggcggccgcggcggtggcggtggcggcggcgctctaggggcgaggagacctccgctcccgagcgatacgagggggaggagagtgacgcggccagcgtggtggtcgagcggagccgatatatattgggccgctggtttcacgcgtggcctcggatgggcctagcggatgctatccatgaatttccgtgggcttcacggcccaacaggttgcctatttttcttttggaataagttcattttgcctccttcaactcatgtccgacgtcctgctgctcctgtcgctccactgaggtcccgccgccgccgctcccgctgcctcgccgttccggcgaggtcccgtcgctccggcgagctcccgccatccgcctcgccgctctcttcatctcgctcgtcgtcgagaataaagagggaggagatgagtaactgacatgtaggctcaaaatttcttttcctttctatttaggtttctttttactttagtgctacgtaagcgccacgtcgatgcacataggataaagaccaagtcaacccgtcacgtaagtgctaggtaagagaaaaccgcctccgaaaccaccgagggagtcgatttgcaacggtctggttttacggttgaggggtgcgattcaaccagacgcatgagtcgagggagataaagtagacttattacttttcttttctcttgaccccctgggcgaagcaactgccaagtgggccctcacctcgtcgtccccgccgcgtccgggcgcgtcgcgtcgggcgcacgcacgcaccaaccgaccatcacggcgccaccgcggccacgtggcgttctgtacttatacccccctctcccgcgatctcactttcccctcatctccgctccattcccccctcccgtgtcgcagcgagaagcatccatcggaattctcgtcgaccaccgcaaccgccatgggcggcgcccacagccgcgaggacctcgacctcacctcctccgacgacgaggacgacgacgaggagtacgacgcccagaccgccacctccgccgcctctcgagaggacatcctccggacctctaccccctcctccctcgagttcctcgacgcgaagctgaaagcgctcgatctcaagtaccaggcgccgaacgcggcgaagctgtacctccacgtcggcggcgcctccgcctccgcgcgctgggtgccggccgagcggcgggcgacctacgccttcgtcgacaaggcgacggcggcgggcgacagcgattgtggcggcccgaggtgggttctggaggttggtccgggtcccagggtctccgcccccgtcggcccggcgctacagctcaaggcgctccccgcgcagcgccgggccgatttcgccgcgggcggctccgtctgggcgctgcggctgccgaccgacgccgccttccgccgattccggcaggagtacgaccggtgcctgttcgagaacacgtatggcgtcgaggccacggatgagggccggaaggaggtgttcggcgctgacttcgccgcgtgggcgcgccccggtgagtccgacgacgccgtctgggccgacgcagaggactccttcacccctcccgttgcgaccccggcgagagacctgctcgaggagttcgaggaggaggccggggacggcagcatccagagcctcgcgctgggcgcgcttgacaacagcttcttggttggagggtcagggatacaggtggtcaagaatttccggcatggcgtgcacggcaagggcgtctctgtgaggatatctgatggccgtggtggtgggaacgcgtacatgacaccgcagaaggctctgcttatgcgtggcgagacgaatatgcttctgatgagccctggagagactggcactcgccattccaatggcgtccatcatgttgatatagagactggcaaggttgtggctcagtggaggtttgagaaggatggaactgacatcacaatgcgagacatcgccaacgacagtaagggcgcgcagctggaaccctctggatcaaccttcttaggattggatgacaaccggctatgccggtgggatatgagggattccaggggcagggtgcaaacaattgggagctcatctgagtcaccggtgctgcaatggtcgcagggccatcagttctcaaggggcaccaatttccaatgctttgcaagtacaggggatggttcgattgtggttggttctgtggatggcaagattaggctctattccaagagttcgatgcggatggcgaagacagcattcccagggcttggatcaccaatcacacatgttgatgttacttatgatgggaagtggattctgggcactactgatacatatttgatcttgatctgtaccatctttaaggacaaggatggtaaagagaagacaggattcagtgggcgtatgggaaataggattgcagcaccaagattgctgaagctctccccattggattcaattttggcagggtccgagaacaaattccatggcgggcagttctcttgggtaagtgtgaatttcctattttgtacagcatattgtttttcataattgagatagaacacacggtagtgaatgttcctattttgtaatctagtaaagccaaacagaatgttgcttcatatgtgcatgctagcaaaccatctacacttatctatcttgtctatagtaaaagtttgttttcacttatgatcagtcagtgcaagcgtttcatatccaaaatggctgcttgtcagtaatttgctgtgcctataatacaatctgaccaggaaaatgtgttcactctatgtctctatctcctatgtatgttaattgacacattaatatcttgaaataatcatgctgtaccttttgggagaaactggtaaagttatgatccatcccagtttagggtagtacggctaataaatatgttttcagttaattcattggtagcaagtatgttcaatatttacataagcttgttaaattaaaaacaagcttattgactgcttgtttggaacatttggttgcttgaagttccaattctcagcttgtcaaggggctaatgagtagaactaaagtaaagaaccctgcaccttaggccctagctctgtttttaacggatcaacctgtgaccttgtcataagagtgtatgaagtaattgcagtaaatcagttgtttcacttgcgtcaatcatgttgattttgttctagtggcaatcagttgtttcacttacgtcaatcgtgcattataaaaagtttcatcctgcagttctgttatgtccatttggcatttggcatttgccatgttaactttcttgctaaattaatgcctacatgctgcataattattcaatttgttaagtatatgtccttatgtatgttcctctatatgttctgattttcccaggtaacagagaatgggaagcaagaaaagcatcttgttgcgacagttggcaaatttagtgtcatttggaactttcagcaggtgaaggacagcaaccatgagtgctaccgcgatcaggaagggctcaagagctgctattgttacaaagttgtcctgaaagacgaatccattgttgacagccgtttcatgcacgagaaatttgcaacaaccgactcccctgaggctcctctggtggtggcaacacccatgaaagtcagctccttcagtttagccaatagacgattacactgacagtcttattttgctttgcgtatcatggtgggagaatctactggtttttgtgtagctcactgctgttcctttcgtggtgcgagaatctacaggttcactgctgttcctattggttcatttgttacttgattttggtgtagcaggcatgttgataatactagtactctttgtgaagattgctggagttgtaatacttgttagttgtaactaggtttcggtgtactctttgtaaatgttgacgatagcgttctgggtgaagacctaatctcttctgggactggagttgtaactaatctgcgtttttatggggctgtttggttcccagccacactttaccattacttgccaacaaaagttgccacaccttgcctaaggtgaggtgatcaaattgttagccacaacttactaagcctaagggaatcttgccacacttttttgagccattgacacgtgggacctaatttgttggaggggaatcttgtcacaactgtggctacaaccaaacacctgtcaaatttgcctaaccttaggtgtggcaaagtgtggcttgcaaccaaacacaccctatgtctatgaaagtgagaatatatgaatatttgaaagcaatatgtgtctatcctcttatctgaatgcttgtacttgttcctcccttccgtccatttatattttaacttctgcccagtgaatcttgacatgacgtgaatcacaacatattgctgattagttcagttcatagtccagaaaccaaatagtggagtaagagccatatacagttgctggtgatgttaatgggccatggaggcccatattcacccacggtggcagcagtggcctgacccacatcatgtaagtacatgatggtaatgggccatagaggcccatacgtacccacattggcagcagtgtcctggcccacatcagtacagtaatcctcgtgcagaacaatcgaatggcccggactcccggttaaaaggatgcactcacaacatctcaaatggcagtgcgatgcactgtgcgctggtgtgtccatatcgacgtgtcgtcgagatctcgttccattgccctccaataatacgaactccactcctgtagccgttgtaggacgtcctccaaggctccaaatccacaacctccggccactattgaaagccgtacctcatccatgccacgaacagctactcacgtgtactactagtactactcctatctttctctccttttttttctgttgccctcacgcacacgatgacacgaataatcgtgaatcatggtgatggagccaagtgtcatcaccgctaataatggcgagatgatcgataaccaactcccgtttccaactttccatgtactagtaaacgccatcgacaaaggcacaagcataaccaccggcactgcgatgctacgcgacgcgacgcagtgcagccgtgcagcgcgttttgctaccaaccatagggtttagtgtgcgtgtccggaccagaaaatatccaacacatcgatcacctatccaccattagctcgattggagatcgcgcaaggcgagacgcgattaaatgacgaagcctttggacgtcctgctcgtacgcaacagaggactagtagaagaagcttaagagcatcccagcagatcatttaaatttggacttctatatttctatttgaatggtcatccaaaaaagattcctcctctatacctttacccactccaataaatcatccatattacagcattcatatcacactattctatattttactaatattttttaactacccatatatatctaatgattttttaagaggcatatatttacaatggtttgaataggtgttggttcgatttaattgcagttaccactttgagaacactgtgtaccacctttaatcctcttttaaaaccacatcagccacatttaccttatcctctcgctaaaaacaaaacaaaacaaaacaaaatccaccaaatccatcgctcctgggagaccaacagatagtgagaggcgggcggaggagcgacggaggggatgcggcaggatggcgcggccgacgggggcagggcgccatgggcggaggtacagcggtgcaggtggcagggtggcgcggcgacacggacggagtcgcgatgggcaacgcaagcgaagaagcagcgacgccggttgatttgcagtgggggcggcacgggcggaggccggatggtggcggggcctccactccggcgatctccagcacgagcgaaggagcagcggcgcctgcagtgggggcggcgcaggcggagtccggatggtggcggcgcgcggcggaggagcagtggcgggagcagtggggcggcgcggacggcggggcctccactccggcgatctccaactgcagacccggtatgtccatcctctctattccccttggcacagttcggatggtggcgcgagttcgtcggagctgggcagttgggggaatggcgtgaggagagagaaacgccaaatatggcatggagagggcttggtttggaggacatctaaaatggcgtgtgtaatggagactctgctggaccgtgttttttcacctccatacgccaaacatgggatggatgtccggatggaagctctgctgggcttgctctaatttcgatcagcggagggcaggtgaggtgaggtgcgtgttgtgtgtgtgggtgatctttggcgcgcctcgtcggcgatattcgtaccaacaactccttagatccgcaaaagattatggcaaattattgatcggtaattagctcctagcaatttgaagaagatgagaaagccagcttttagcttttagttttttttagtgagaaattttatgatcctagaaaaagtatttcgatgtatttaaagtttagactaatttttatcaaattttacattagaaagtgtgatacattctggtaaatttaaggatgataaaattaccttttttttaattcaataactatttttttacataatgaaataaaaagaaaaactgtttagagatttattattattatttttttgggagaagttcttaaaaacaccatcgatactactacctccgttccataatataacaacatagtattggatgtgacgtattctattactacgtatttgaatataggtttcatgggagtacgatcgagtagctgtttccaagagccttatcctttcgttggagaaagcatgatttttccatgcttttggtcccgtactagcccggaattgtgtcatgtacatgggctactgtgatgtccttccaggaggctagacaagtgggctggctttgggcccattcggctagggagaaggagactagaaaagaggcaaagcagccagcagccagggtcatcgatgaatcaattaccagaacgcctcagacgatagcttcttcctccttgctgctgcttcccctctcaattcctattctctagtcccaatctcctgcttcctcttgtctgatctctcttcctagactatacctctctttctcctcaattttgtatccctaaacacttatattcttgagtagattgtaatatatcggtggcatttatgtgagagatttggtgtgattgtgttggttcgtgacaatatggtatcagagcagtcaattcgtggggtttctggtgtggagatgaagtgggagagcgctggtggtcagaggaactgccaacaacttggtggtggtgtctttggaggagatgcccaccacctgttcgatgaaatgtcgacctgtccaagaggcgattcagctgctgtccttcgcgtcaccgtgagccagatcatatatccagtgacatctgaggtgttgcatcaagtgtacaatacctatggagcagtggcggtgcaggttcttgcagtgagcacatggcaagtcaaggctcttgtgtcatttatgtccagccatgacgcggagagggctcggtccgccacccacggtcgcgacatctacgacgggggctgcttaatggatgtgcagcacgtccagatgttccctggagatggcgccaccaccacgcacaccacctgtttgacaatggtaccaagtagcgccaccgccaggccagcggccaagagtactgctgctacaccagaacgcgtgttccctgctacaacagcttcatctataccctcaattacatcagcagccatggtgacatcggttcctttcaacgagaccaagaaggctgagactgacatggacaaggcggtagagaacttagacaagaccattcaagacctgtgcaccaagatcgatcggatgctggaggcatttcgccacaccaaggtggatttatccttgagcaaggattccactagagatgtggcagcgttgagcgccaacactgatccaacttccatcgcattggaggtcagtacagaggccggctcaactaaccatgttgacacagccaagcttggcatgggaacaaccatcgagtgttcaatgaagtgtgagaaccagttggctgatgatgatggtggcaaagacatggccaaggaggagtggatggagctcatggaagtagataccaagttcaccactatgtatttatgcttcagagatccattgttaatcatcaatgcaattcctcccaggaactggagttggtgcttgagccgtgactactttggagttgtcggcctctctttcgtttcattgaaattggaagtactctatggttgctttgaccggagctcagaatacacagctagccctccaccagtaccaccttggagagcagcaattccacggaacaaagctgagatgacctcaggttctcggccgttaccatggcttgatccacagctttgtcaaggcagcggaggcgtggtggtaaaactcttacaaccctggccgccacttattcaaacaagtgtttgagctgaaattgaaacactgaatttatatggtgagtctcatcaagtctccttgaactacagcgttgcccaattcatgagtagaacaattaattccactgagggcttgctgcaaaatctgattgttggatggtgtatttggtatgagatatgtctctctggtgcctttaggaaggcctatcagcacacacatcattcaacctatggttgggcatatggggatcatgaattgttcttgctgctgatgctgatttcccatctatcacccgatgcatggtgtgattgtttgttcagtggagctaatgttgatggtaattgcacttgcaagtcacatgagagacgtacccatcgccatgctcggttctatactattccaatttcatttcaggttcagagtaacaacaatgatgtactagatgatacttcttggactcaatttggatcaaacaatggtgaggcatttagggtttcaacaagaaagttggtcaacttgcaaccttggcctcctccttcgcaatggaggagtgaggtattcagtttgtgtgcagcaggagggcaagggctcaatttttcttggaagtgtatatctgaagggaaactaatgttatggacaaatgtgaaagttattagaagagaatatacaaacaaggtgttatggctgtcagttgccaattcttgggatttaatatgggcagtgctacaacagttgctatgtacatctgagcttattcttcaatggaataattaacatgggcagacacatgagctattgttacaaagggagcagctgaaacttggtgcagtccatctcagtttggaagctagcactttcagtaagaattctcgtggaatagaactggttaaatgttcagagagatgcctcatttgtttagtttgtgaggacagcatagtcttgcacacatgggcctatcgagtggttaaattagttgatgcaagattggttggtgatcaaggtaaaaccatacaatttttagcaatttgggagtttgcaaacaaagaagtagctctcattcagacaaagaagcatatgcatgtttctcagcccactgatctcaatatttgcatgttacatctgggctctcatggagtatatgctgatagtagtggtgaagaaggcgtgaaggcttggtggttgaggcagcaaaagcatggtagagagtgtggttgtaatgctcaggttttatgtatgttggataagtggattcaacagtgggcagggtctacatcagatggttcgaaggtcatcaaacaattgttctgggattctgcccaacaaggcatttccctgcaggtaccttgggatcttgggggcattaatctggcgagtcagttgcatcggcttggggacaagccgattcttaacgggggaagaatgtcatgtacatggcctgctgtgatgtctttccaggaggctagacaagtgggctggctttgggcccattcggctagggagaaggagactagaaaagaggcaaagcagccagcagccagcagccagggtcatcgatgaatcaattaccagaacgcctcagacgatagcttcttcctcctccttgctgctgcttcccctctcaattcctactctctagtcccaatctcctgcttcctcttgtctgatctctcttctcaaactatacctctctttctcctcaattttgtatccctaaacacttatattcttgagtggattgtaatatatcggtggcatttatgtgagagatttggtgtgattgtgttggttcgtgacaaattgccgtggtaatttaaggtcggagttagttatcggttgctactgttttggtttgccttggattcgtgcatattgatagcagcaggaacgcatgtttaaccccaaattatgcacgacacaagacacgcatgcagtgtcctctctctgcttccttttgtccctggtcctcacctagcttgtgtgaccaaactacaagctggagtagctagctattgcgtgcagtccagttactccgtttcattggtcgatgctaaatctagttatatatctagatgaagaaattagtacagtacccaatataatatacaatgcaattatgcaaggagccgtacgatctcctcccaattatttctgcacgacatggaaataccaattagaccatgcaaggagagcctgcatcccagcacctgtctcctaagcatcctgcatatacacacacacacacacctattttgttcgagcaaactcgattattggtttgacctgatttaatttattcgataaagtcatgccaaaacgagccgatattaacggagaccacaggagctgaccaatatatacgggtacacttacaaatgacctgttgactttgtgaatgtatagcattctcaggggcagaatggtcatgacccagatcagcaacgaaaggtagtagtggtgccaacaactactaccaagtctacaatggtagtagtgcatacgtgtgtgccagtaatttaatattgttatggattaggcacagaaatgtgctggtagttgcctctggagcaagatttgcagatatgaattaaagtagatttactcctacgttccaacaacttcatttcttcggttattttcttaatggacttctaattcggtacggtctcgcgcgtgcaatatataattcgcaattagttcgccacaaaacgggaagagataagatcgccatcaacaaaccgaagccctataccccggataacatggcgtattctgtgcaaaaaagtacccatgtttcgatggcattggtggcctgaaacatgctgagccggaatgctgccaaacattcctggagtaaaggatttgaacatgctaatcaagtataggatggtccaatgaatccgtactgtttttataccataacctactctttgatctgatccacaacgacgacgtcgccgaaatgaaaagggaattgatcctgatcgaactgtctaagcaattgccaaccgaaattcgccagggtcaaacccatacaatcacggcaaagatctcgcgatggattgaagaagatctgcagagaaagcaaaagcaacacctgtacccactgccctcatcctgtcatcccagcagcagctgccgcactatagccacagcatcattatccccaatgtgagtatgtcgctagctagctaatcccccttttagcctttgcgataatagcagtagtacagacgatcgagtagcatacgatattcttatctccgatcgttggatgcgaccaatcattcgacatctcgaccaccgggcgatactacggctacgtcatgttcctttcgtgtgcagtgtagtgtactcactcgcgagtcgcgactcgtgtagtcgtgtgtagtggttgtgttgtggtcgaacgacatgagtgaaaaaacggcgagtacgacgacgtcgccgttgctggccaagtggccatgcaatgcaaccagtgtacgcaccgcgacgaaatccatcgcgagcaatgcgacgagttgaccggaacgcaagcggattaccgggcagtgtcggcgcggagatgtcgggagaacgagggccccgatcggtcgaaaatttcaagcattccggcgcagaaaagcgcgcgcgcggcgcgtcccgcgagtcaaagacttgggcgcggcgcggcgcggcggcctggccacggcgcgacatggcacggcgctgcaatggcatggagtccaaggcaagaatcgcatacgcgccgtgcgctgtcgccgagccgaggcgcacacatggcagcgcagcgcagcgcagcgcatgcatggtggtcgagtcgagtgcgctggtctttttctccagcgaaatgttcgcatcgcacacagcagcagcagcagaaatcgcacgatatatttctgacgagcattgttgcgtggtggtgtcgttggacgacacctcaccttctagcacgtctggaaatagctccgagtcatcagcctttcaggtgagacatggagtgccatcctttttaagcaatctggtacagttgggaaggggccccaagagatctatcgtgatcgtagcaccaccatccgtccaagtgtccatctgatgaaatctacttcgtactctttttttggagaggataaaagtggtgatggtgaggagatagtagttttctgagttgctcgtcaacatcatacatcatcctcaccaaaaaaatcatggaagcgattacacttgggaccctagagacccacacgatttttttcgatccccccggtaggccggtacgtacggctcgcatgcacgaggatgccgatcgatcgaatcaccgcaccttattacacatgctaaaccccgtaattagctcgcattcccgttcgagtttagcaacggatcgagatcgacgagcgcgacgcgggcgacagcgagaggctgcctgctccgacgagacgcgtcgacgaatcgcgcgcatacgacgcgtacgttttggttgactctggcggtggtgattttcactggtgtgccccgatcccgcggcgtgcagcacacgatgttgatctgtgcggcgcgcgcctggctgtttcccggcacgagcacacgactagcagcgtgaaaacgtcggaatttctcgtgtgaaaattgctaaaagacgggtcaaatgaaaagggccacatagacacagcatatgacagcttcagcattacagcaatttgcagttttccgatctgagtgcgggcgcagaagaggattaacctaaacaaactaagtaccataatgctagctccagctgcagtaaccttatccggataacaattactcctacctgctactactactactgctactgctagcgtagtggtaatcccttctttaattatcgatttcttaatgaattggccgcgtggaggaccatctctttaatgatctaccagtacgtcaagatttggttggtttattatatcctaaaacactgccttcacgttcttgatagcgccgggtccacccttataatactgttcgcccattatattatttatctctttcccatacctaattccatcaccaggaccagatgcaggatcagtacgtactaatatatgtttttttttcgcgcgaaaagtcactgtgcacattgctttgattatgttatcccgtccgaggatttcccctttttgcagatcgcgtgctttactttctgatcaagacttggaataacacctcaccttcttagtacattctaaccttctcttcatgatcctgtcaagcttgtacagcacagcagcagtagtctagcagcaactagtagctgggcaaaaaaagagaagaagataatactactaagttagcactattactttattaggctgtattcttttacgtgggttggaactaaaaccatatttagatgggactaaaactttttatccttatcacataagatgtttggacactaattataaatattaaatgtagactattaataaaacccatccatgatcttgaactaattcgcgagacgaatctattgagcctaattaattcataattagcctatgtgatgttacagtaaatattctttaattatggatttaatttggcttaaataatttgtctcgcgaattagctttcatatatgtaattagttttgtaagtagtctatatttaatactataaattagtgtataaatatagacactaaagttaagtccctgaatccaaacaccacctaatccttcgtgcagaaaaaaagaacgttaaattagtacataattaattaaatattagctaaaatacttaaaagattaagttctaagttaaaaaatattaagtatgggtgtgtttagtttacactaaaattagaagtttggttgaaattggaacgatgtgatggaaaagttaaaagtttacgtgtgtaggacagttttgatgtgatgaaaaagttgaaagtgtgaaactaaacaaggcctatataaaaaaaatagtgatctcttatgctaacattaacaagctaaaagattaccttggtttcacttattgcgactatatattaaaaaacgatgtaagcgtatccgagtaacgaactttaattttcatttctaaacccgtatacttaactaaaaaaacccgtatacttaactaaacttaactaagtatagaaaatgtgacgatgatcactaaactaacgaagctattacgggtatgggttaacgatatcgttgttgattccacaagttggtagcaaatccgtacgggcggccaatggagttataaatggaggcatggcccactggagtacaactactctatagctgtagcaaaagccatgttgcgagtgggggccaggggcacgcacccggttggcttacgcggcacgaaatacgggccggggggagagagaggataatgtggcggcgccccacaatcttgcactgtgcctgccatgccgtccctccattcttttcttctcgtactccttttgctggggaccaccgttcccccggccgtgctacgctattggataggatcaacgcgtggctactgtccgtgatccattcatggcccacatttataattaatgttcccattttaactgtttccatccctgactaacaagccctaaataactattccagttaattactttctcgattctaaaatataagaacatacaaccgaataaaacatttagggtgtgttcgagggagagaggattgggaagatacgcaaaacgaggtgagccattagctcataattaattgagtattaactattttaaacatcaaaaatggattaatatgattttttaaagcaacttttctatagaaaatttttgtaaaaaacacaccgtttagtagtttgaaaagcgtgcgcgcggaaaacgagtgacaatctcccctatctccaatgaacgaacgcagccagtcttatagtactacgaatttgaacagaccacttttgtactcggcgatgaggcgacggatccagtggtgccgaggcacgcgcacgacggatctagctctggcggtcagcgaaggcggtgtagcggtggcggactttgatggggaggcggcggttctgtgggaagggagggagcactggcggcggcgcacggtgaggcaggcgacggtggctggcggaggaccggagggaggagtggtggcgacgccgtcacgcgacgcgcgttgggaggtcggcagtggcgccatcacagtggcatgcgtagggaggtcggcagcggtgcaccgcttcggcggcggcggtgtgctgagggaagtcggcgccggcgccatcgcgcggcgccggcgcacggcttcgggggcggcggcgtgcagatggaggtcggcgccaccgtgcggtgcgtgtagggacgtccgcgcgtgctgtcgtgcggtggagtggtggcggcgtgcaaagggtggtccacagcggcacccagcatcaacctccgagctctagctactgtctattaaatttgtcaaattgatttagatttgttaaaaggtccaaatatatgtatattttgatataacagtgtcaaataagtaagggtaaaatggactattggcccctatttaaccgtgttaacccgccttaacggaacatggtcaaatagttcattccattttgaaaaacaggtccaaataagtaaactaaaaacaagtagggtcaaattgataattatgctttaaaacagggtcaaataagcaattatctatttctacgaatttagacataccacttttatactcttgtgtagactaaaatgtatttatagatgtaagtttcttttaactgagtaaacacaccacttttgtgctcacgcgcacatacacgcgcaggtgattatacgttgaatgcctagcttcacatagatagagttcctccataaaagaaaatcatcttaattagaaatgagacataaaacaataaatttggattgtcctccattaagttatatttttttattaaagagagtagacttcattactggctgcacccatgtgtgcgaatagtattaatcttatttcatgttgagtgcttatcctaactcgtctctttaaaacatcaatttttattggagcaatttttttcacataaataagcttgttcagcagatgggcagctgtgtttgcgtcgcgtgtgcgcgataccgtatcgccgatactgttgctagcagtcgaacaggccaatacctcattcataccttatattactgcgttttcgttttcaacagtttcgaagataaggccttgtttagttttaaattttttctccaaatttttaactttttcatcacatcagaacttttctacacacatgaactttcaacttttccatcacatcgtttcaatttcaaccaaacttctaattgtggcgtgaacaaaacacaccctaagggtgaaacgaaatgataggagtaggagtactcgtaacaaaaaaaagaaatatttttgaaatttaaatttagctacactttttagaagccagcgacgagtcaaaaaaacgaaaaaaagactgacccaggtggtggaaccgaccgacgtggacagagcgacgagtgagccagatggatggactgacccgccggagcggcacgtgccggggaccgggagtcaccatccacgcgtcagtcccccccgcaatccccttcacgtcaaccctcgctgccgaccgtgacgtgtcgaccatacgaggttggaggagacccaagttcccactgcaaccgcggctccgcctcgcgacacccacgtgtacgcccataactcagccacgttcgctacgactgtactgtatccggtagtagtacgtgtacgccacacacaagtgcaacgcagagggaaaaatatcacctcgagtgggcatgtgtttgactacgtggtgactgtgtctgcgtctgcacgcgatgcttcggcgtggcggggcaaccggtgggggacggcccagtcgccagtgtcgcttcggccgttcgctcacccgtgactgcagtaaaaagggccagctgccgtcgtcagcgacatgcgacatggagatggttcgaaatcgtaacgatctgttgtgcctcacgggcagtagaagcgcgcctccgtttatttggggggtttgactgttggtagtggttttaattaatgctttttaaagagcttggctggctacgttgacggctaatctgttttgttgctgtcttacacataatccgtaccgatctacttgtaggagttgcacaactgcacaagttagagctacaactactacaaaataccctatataaaagaaaatcgtattcttctgatcttctgctaatccgtctgcgtcctccctggatctgcatgacgagaacggtagtgcgccatgtgagattagattggatcaggatcaggatcagatcagataatgtttggttggtagtactagtatgttaggcgctgggcgatatttgcgttcccgacatgccacgggcatatactaccacagatgctcggctgcggttggtatggatacacgtttgaacgttgctggggcctcaattcaaagccgccggttggcgacggcggcgaggcgcggggagctctcagctttggcaaggtcggcaaggcgccgccgcctgggccctgcagtgctggctgcccacgtgagcttccacgttacgtggcagattttggttggggcttaagcctggacgccacggcaccggggcagtctatcggcttatcctgtcgtggctggccgccacgtgccggtcctacggtgtgtgctggccttacagctgtggagctgagccggcaacgcggtcacagctcttcgcacgtctctgtgttatttctcacggggtctacagctggtcaggattactgtccccaaaggtaaacctaactttaacctaacgagctttgtttagttcattggtaaaaccaacgatactgaacttttgcaggaaagagaatgaaggtcgcggagtaggagtatttggttcgaagcttttgtcgctaggtagctgaatggaatgggaatagtttaatttttatggactacttttgtactatattatagatgctcttacaccaaatttttttagataataaaatataatatcccggcctttgctcaaaaagaattacagccaattattacaaaaatctactccagaagagagtgtagttcaagacaagttgaacacaccaaacaagagaagagatgacccaactgagaaaagaaaaacaaaaggtggagctagaaggccttgcaaggcctaggactgaagttcgaagtcaatgcatagaccaatgacaatatccttgcacgaagaggtttctccaaagcggtgccccaaggaggatgcgacgtggatcgtcgccatcgctcgttcggaaccgaagcaaggttttcacccggagaatatggtagagaaaggaaaggggtatgctaaaacaacgcctccaagaaggggaacgacgccaaacggcgtcgccgttgtcagccagccaaatggctcggcaaggctttcgcccgcgattccctgtccaaacccacaccaccaatccgcacaagaaggatcgtcgtcggtcaacaacattgtcctttcagcgattcggccaaggccaccgcccgaagttgttcccgccgttgacggcgcgcccgcacccggactcctccttccctgccgctagaccccttccccgcctccacataccgccgccgccgccgacgcaccgtcagccggatgatggccttcaaccatcgccgctataggtaccatcgtcgacagccgccaccgccaccaccacggacacccctgtccaaccaccaccgtccagccgccaccgtcagccgccaccgttgctagccagcgccgccaaacgccagccgtccagatccggccggggtggcgcggatcgaaggtgtagcacgaagcgcgggtcgccggcatcatggaggaaggcgtcacgggcacggcgttcacagccggaacattgacgagggcgccgcgcctccctcgtggtggtgaggttcttgatgagggccggcgtcgcggcacgcgccgcagtccgccaccgtcgtcgccaacttcgtcgccgccacatccgccaccatcgccgctgctagccacctccctgccaggtccgcggagcggcgccggcgacgaccgagcccgtcgccgatcaccccggccaagcggggagaccagatctggcgacgccgtcgcccgtcgctggagccgcggagaaccgacaccatggtgccccaccgccgtgcctaactctgcgcaatggttttcaaaaaattagacgatgtttcaccctatataaaaataatgtttcagcaaatagcaaaataatgtttcaattcttaaaaaaaagtgaaacaaggtcagatcgctagatgcaacaacttggttcaacgtatacaacaaacgatttgaagtcattgcagcacttaaaccccatgtacatcagcaacccacgtgtccatcaagatgacattattaaacaatatcaaaatccactgcaacatttgatccataacaaaatgaaacatcacgattacacttgtaacactgtggtgggcacgggcgcccgatttttttggcgcgcatcgaacgctcgacccaaaggattttcctccaacttagtgtagtttttcagaaaagaaattttcggagttagtatgatagcagatacatatttggtttattgtcctgtcgtaatttgatatggttaattagcttatagtgaaaattttaataatatttggtataatatcatattcaatcggtggctctatctcgatttccaacagttgcaagtgttagttttctttaaacacgttttatatggtgcacatacattccgctactaaaaacattttttccatcctgctcaaaccgatttctgcatgtggacaagcggcccaaatgcaccaaaaggtatgcaaaaatcgtttttttttcatgcaaccagcacaaccgcatgtgaaaatccgttttccgcatgtagacacttaagccgaccgcatgcgaaaaggaataaatgtgaagaaaaatgttccgaaaatcctgtcgtcgtcgcagccgctgtcctcctcatcctcccgtcgccaccgccgtggtcgacttcgccctaccgtcaacagatccacgcggggaggggagggggcgctggatccgatcgaggaagggccacagccggatttgagcacggcagagccgcgcgctcgtcgttatcgctcctcacctcctttatcgggcggggaaaggccgtcccacgcgcgccacctgtaggggaatggcgtcgcccgccgctgccccttgccgctcctctcccgagcgggggaaggtcgtcccccgtgctcctcaccatgcctcaccactcctcgccagctcgggaggagagaagcgagaaatgagagaggattttgagacatatagtagtttgagataaagatgagtaatgagggggtgggagacaagtagagataagaatgacttgaaaaaaaatttaaagtgcttagagggaaagaagggatatatcagacttgcggactttaaaagttccgcatgcgaaaatatgtttatttttgtatgtggccacctaagaggcatcgcctaaaaaaaataaatttttgtatgcgggcctcgtaaggagccatacgtgaaattgaatgtttgagttttggagacgcgccatattacagtctgtttgtctctcgtataaaaaatcgttttttaagttgtgattggattgtagagttccttctaagtttgcgagtacgataagtgaaatggtgggtatttttttttaaaaaaaagagaggatacggaatcttcgttttgtacatgtttattgcattgatagattttatggaattgttagcatcaacttctttccgtataagataaggaagacgcacaatattcacatgttcttaaacatttttcttaatagttttttaacataaggtgtggcaacaattttggtatgtattgttgcttggaatattggattgtcatggtggttaagaatctcttagctgtgcgcgcgctatatgtgtttatttttaatcttatgtaaaaaagttatgatgttgttttataaattaaattacggttagttaacaatattatctagtattatctatgctacgcgtctgacaagaatatacttcaatttaatttatactcgcctatacagacaacatatatgacagaagctaaaagattgcaagattttgattctgaaattttgttgaatgtgatttggagcctgccacgccgaataacatattgttttttttttgaaagcaccataacacattcttttggcgtagcaaccaggagtaatttcaacaccaacaataatgatatggtcatgaaagtccaatttaaaacacatgcaacagaacagtgataatctgtaccattataaaaggaagttcgtttacgacttttcattttcacataaacatcatgacaaacaacaccaccatattactatcacccacgtaattcacgttccgatgcagcagatcaaaatatcttgtgaaataggaaagccctagtggtttgctagtcatgtgtgcatgactttacttatcatgattcaaatcctgctacccacaaatattactttatctatctcattttaagtacaaccatagttttctatacccaattttaattatctattttatttaaaaaataaaacacgtataaaatagcattcatgttttattatctaatagtaataaaaatactaattataaattttcttaaaataagttgaatcattaaagttggatatgaaaacacgtggttgcaattaaaattggaaggagggagtatgcatttgtagataggtttcaacatgattttatcaagaacagatatatgtctcttatagtgtacgtacgtatacgtctgccgtatgattaaaagaataatgggaaaaactatttggaaaaaccgtgcacaagtaatggctctccagtactcctccccatctgtcccacctgccaacagccccggcgttatccacccccaccgtccgtctcccactccgtctcccacccgcacccaaaggtgagaaccgttcggtgagaatacgtctgcagccgcgcgcaccacgcgacgtatccctcccgtaagcgcctccgcgatccccgacgccgcgaggcacgagaagatttcagataaaacccggccgttacacgagagtgagaggggcagccccgtcatttcctccccgtgcaaagattggatggataagcacaccccaccacctccacctccacctccacctcctccttccccttccatcttcctcctctcaactctgtagactctgctgctgcgatatatatctatcccgttcccaccccgcgatcttccgttcgattttcttccaccgtatttatagctcgtcctctcttctctcccaccctcgtccgttcttatccacctccacgcccatcacgcttgcggccgtttccatccttccgcttcatcggagtagttcgccgccgggttgggttttcttcttctcttgatgcgacgtggaggcggcgagttgttcgtcgggtgcacgaaccggtgatttttttttgttttggcgatgccttcgctctcctgccacaacctcctcgacctcgttgccgcggcggacgacgcggcgccgtcgcccgcgtcgctgcgcctcccgcgcgtcatgtcggcggcgtcgccggcctcgcccacgtcgccgtccacgccggcccccgcgcggagggtggtcgtgtcgcaccgcctcccgctccgcgccgcggccgacgcggcgtcgccgttcgggttctccttcacggttgactcggacgccgtcgcgtaccagctccgctcggggctgccccccggcgcgcccgtcctccacatcggcacgctcccgccgcccgcaaccgaggcggcctccgacgagctctgcaactacttgctggcgaacttctcttgcctgccggtgtacttgcccgccgatctccaccgccgattctaccatggattctgcaagcactacctgtggcctctcctccattaccttctgccgctcacgccgtcgtcgctgggcgggttgccgttcgaccgcgcgctctaccattctttcctctcggcgaaccgggccttcgccgaccgcctcaccgaggtgctcagccccgacgacgacctcgtctggatccacgattaccacctccttgccctccccaccttcctccgcaagcgattcccgcgcgccaaggtcggtttcttcctccactcgccgttcccctcctcggagatcttccgcaccattcccgtcagggaggacctcctccgcgccctcctcaacgccgacctcgtcggcttccacaccttcgactacgcgcgccacttcctctccgcctgctcgcggctgctcggcctggattaccagtccaagcgcggctacatcggcatcgagtactatggtcgcaccgtcacggtcaagattctgcccgtcgggatcgacatgggccagctgaggtcggtggtgtcggcgccggagacgggggacctggtgcggcggctcaccgagtcgtacaaggggcggcgcctgatggtcggcgtcgacgacgtcgacctgttcaagggaatcgggctcaagttcctggcgatggagcagctgctggtggagcacccggagctgcgcggccgcgcggtgctcgtgcagatcgcgaacccggcgcgcagcgaggggcgcgacatccaggaggttcagggagaagccagggcgatcagcgcccgcgtcaatgcgcggttcggcacgccggggtacacccctatcgtgctgatcgaccgcggtgtgtcggtgcacgagaaggcggcgtactacgcggcggccgagtgctgcgtggtgagcgccgtgcgggacggcctcaaccggataccctacatctacacggtgtgccggcaggagagcactggcctggatgatgcggccaagcgcagcgtcattgtgctgtcggagttcgtcgggtgctccccgtcgctcagcggcgcaatccgggtcaacccatggagtgtggagtctatggcagaggccatgaatgcagccctgaggatgcctgagccagagcagcggctgcgacatgagaagcactacaagtatgtgagcacccatgatgttgcctactgggcgaaatctttcgaccaggacctgcagcgagcttgcaaggatcatttctcgcggcggcattggggtattgggtttgggatgagtttcaaggtggtggcacttggcccgaatttcaggcggctgtctgtcgatcacattgtgccgtcataccggaagtctgataatcgcttaattctcttggactatgatggcacagtgatgccagagggttcaattgataaggcaccgagcaatgaggtcatctctgtattgaatcgtctgtgcgaggaccccaagaacagagtgttcatcgtgagcggtagagggaaggatgaacttggcagatggtttgcaccttgtgagaagctggggattgctgcagagcatggttacttcacaaggtagtaatctcttatcttccattctccttgttggtacgaagttgctttgcttgcatattagtagtgttttagatttggattaaatctgtaggatgatataaatcatgaaacagtacatcaaccagtacatttatcgaataacatgaagcaaaatattgagttcataaacatatctagatgcagctgtgatgtccattgtactaggataatcttgaggaggcttttgatttatgccattaagctaaacataggttttagcgtatttatctagtgtcattttcagttacaagacaggtagaggagcgtttgaatttgttctgggaaatttgtgatttttactaatctatggataccacaggtggagcagggactcagcttgggagacctgcgggttggccgtggactttgattggaagaagactgcagaaccagtgatgaggctttacaaggaggcaacagatggttcaaccatcgaagacaaggaaagcgcgttagtttggcaccacgatgaggcagatccagattttggttcatgccaggcaaaggaactgcttgaccacctcgaaaacgttcttgcaaatgaaccagtcgttgttaagaggggccagcatatcgtcgaagtaaatccacaggtaagcgcctgccatcttccttccttcctctagttgtttgacagtatatgtttgattagttctggttgtagacttgtatgcacaacatgttgatcaactagatgtcgctgtcaaactaaaggcaacggataaggattgctctaatccaatccagtcttcatccaccacatacttggggacaatctatatctgctcgacaaataggatatgaatcagcatggaccatgtcccgtgtggactggaaaattcgcgaaaagagtccccggtctttttaatatttatccctgttaggaaccaactcaatctcaatctcgccacccaaaccaccaacctcgaaatttctgtagtgataacatactaaaatcatctctcatgacaaattatctttcatgtcatgcagggcatcagcaaaggtgtggttgtggacaacctcttgtcatccatggtgagccgagggaaggcgcccgatttcgtgctgtgcattggggacgaccggtcggacgaggacatgttcgagagcatcgtttgcccgtcgaacagcagcgtcaagctcccggcgagcagcgaggtgttcgcctgcacggtcggcaagaagccgagcatggccaagtactacctcgacgacacggtcgacgtgatcaagatgctgcagggtctcgccaatgcgccatcgcagcggccaaggcaagtgcagctgcgggtctcgttcgaaggctcactgtgacggagacagggattattctgcacagtataaaaaccaaggaggaaattccaataacaaatggaaaagatgatgatgattcagttcgtgtggtttaggggttagctgcagaagttacaggataaacaggtttttttttgtttttttttcttctttttctttcaacattttcagccttcttccatgcttgtatatgccccgtatgataaaaatatgcgagaaggtttcagccaccttgtatatgtagttgacgatgacgatgaaatcagaaccaaaaaaaaaaaaaaggaaaaatgattctttcttcatgttgtctcttgcttgcttcccttctccgtccagtggccgtctcgttcgggcattttggccatgcttttcacctttgctgcattattacagaccgatatggatgcccaaacgccggatagcgccagtgtcgcagaccttggtcctccttatccggctacgtctccactctcttctcttgccggcgcctgacgctgaccggaggatcgccgccgatattggcagcagcagcagcacattcctctcctgatccgaatgctgtggaaacgttgaatttccttttttttcctttaattgcaacacattcctcatccaaatgctgtgaaaacgacgctgggaattcttccttttcccccttccgaattgctgcacattgctaatccaaatgatgtgaaaacgttgatttctttttttttttcagagttctgtaccaagacgggagcctcgccagctgccaagttgtagttcaatggacgcagacatctcctacgagggattgggagattttaaaaaaaaggcactaaagtaaggcctttttttgccatgattatggcgggaacgattttctctcggaacaacaggttcctgatgttagtaggcacagttgatgtggtacacgagaggctgtggaggacaacgctgatgataaaaaggacagacgatccatcatttcatctcaccggcaagagacttttggccgaaataattcagatgtccggctgacccgccacactctgtcggcaaccgtggatgttcatctatctttaatctcctcatgtcgctgatgaacaggagtaagcaactagcagccggattaggagagaattctatggcctaatgaagttgctaggagtaggagtttacccagaaacctgaaccaagtcattgctgttcttttttttttgtttgtttttccaatggatcaaagactgatgaaacttctgtgatcgcccatattagcagctgtggtcgaaatgacaagctgctttgacccggctggcctaagagggtagcacgaatcttctttcctagtgatagctagctagctttgggcaggcttctaccaatactgaagtcaacaaaggtagccaaggataaggagacgatatgcatgaaaacctccagctttcttattcttttcgctactacccaatcttgatatggaggtatatggacacatggcttgccataacgctactaaccaattaaactctcttactacctaggatgccatctcaggttaaattactttaggtcaggtcactgtactagcatcgatccggcttgtgtccattctgcatttcagcatgtggagcagtctcatcgtttgattacagctgattagccgttgaacgaaccaaaaccgaaactaaattacgggtaaagctcttatttatgctttcttaacaacttaataatcaatactgaaaaacaaactatgattgaaagaaatcaaaattaagtccaaaactaagttcatgggtgtggcctaccatgaacggtgtttgattttcatgggtgtggcctaccatgcaagactgtgacatcaaaggtaacagatggcgtagggcgaccgcgaggagaggatcggatgcatgacgacgcgccgatggcttgtctgtctggactgtgtgccgtctgctctcctcctggccaggttcagagaaatgatactacagtgctagtagtttttggtagggctcagctacatggatctgatcgtgccatgaatggcatctcgtgcttttgctgtagctaggcagaaatgcttgacccgagttagggcatgagttctcaaaaaaaaaattagggcatgttcttttctcattaagatttagatttttcctcgatttttgtacgttttctaaactactaaatggtatatttcgtgcaaaacctttatatatagaagttgcttcgaaataacaaatatatcaatttgtcaagtttataataattaaaactttattaattatatgctaataattttctcgttttacatacgccaatgtaatcttcaacttatgcaaacatgaacatattttttgattgattggagatcaagagtataatcacttcttaagtttttctttttttttttgtgatggtagctggaatggaaagggcaatgtgaagtctgaaaccatttatattcagtattcttgataaattacgtgtggagaattctctcctcagagaggaggtagttttatatcgtagtaggtcgtagaagcagctactgctatacgttgctatctcccaaaagtgttttgtttcgttctgtttagtttcgtctatccttttgcatcacgagacatgaaaaaaaaaatccacatcctcatggtcttatctcgtatctgaagattgccggaaccaagaacagatgaaaataaagctagatatctcacagtcgatgatgcttcttatccatatatcctcgaatacagttggttctcatcgagataggttccctgtcaaaagatattgaattgtgtttgctagtactcctaccctaggacaagttttggatatgaccaaattaggccttggactattattatcaactctcccattggcacatctgcctgtccataaattccaacatattattgccgcctgactcctgttggtgacacgacatgagccatgaagcacaccgagttattaatttcccggtgatctcatctgatcatctgaactggatggaagggtacaaacaactgtatgcatggcatgggacgccgaatgttctgaccaagagatgaggcaggccggccggcgcatcgtcgataaggcagcagaaggctcggtgcaatgtgtgcgaataattgagccaaccaaggaagagaatatccgatgaccttgcttgcttctcgatcgatcagagctggaaaaaatcttctttagcatgcatggcatcgatcaatcggccaagaaatcctcccccggatcaagcacaatatacatatacctaagcatcatgtccgtccaaggaacacgacactagaggcttccaatgagattatatattctactgtgttatgaactttatcaacatcgccagcattgttcatgagcagagatagacagagttggtctaattcaacaagcatgtgtgccgacgaagaaatactcacagtcgtcacacgtctcgctagttttggacgatttccccgtgtcgtatccgtgcggatcgaggagtgatcgatcgagcatatgctccgcccgcccacagcgacgacgtgcgcgccgtgtcgtcgctgcgtgcaggtgcgtcctgggcgggcggccggttgattgatcctgcactgcgcccaagccgattattcccttcggtgcgcgtttgtagttttgtgctgtgcactgaatttgagttttttttccttgaaccttttaatttttaattttaaaaagaaaccatttcaaaaattatttccaataactgaacttttgatcatgtcagtaggcaaaacgtggtcatgtccggctgacaattatttggccacatcatatcgactggtatggcaagataaaactgttacgtctgtttagcgtggtcaaaatattcagattttgaaaataagttttaaactttggaagagtttatttttaaaattaaaaataaaaaggttcagtaatgaaaaaaaatcactgaatttcctagctagttagctactctcgtctcaatacaaaatctagattggaatggaacataatcgtctatttatttaatgggagaagtagttcgggttttcttggtaagcgtgacggttggtttggtgcctcgatggcctggtatattctctcaagaatctatggtgctacaaccttgcttcgttggtgtgcccacatgcactttcttgagaaagcgacagcgttggacgtgcacgagttcaacgacggctctgggctaacaagacgtgatgttgtacaagagcactcggtttggttactgaattttaaccgtgcactccaacgtactagctatatacatatgtgtcgcagtaagaaaggtcgctacgtggagagttttaggttgacctgtttggttggtatggcagccttgtcgactgtttcctctaaaacgtggcctagttcagttagttgtcgtaattttttagaacagttagttgttgtaatcaactaatgacacaaaaacaacattattggagaagctagagcaggaaatagcagataatcgcaaaaagaaaaggatataataacagatatatgggcctcgaatggtgggcctatcaaactggacgctggaggtggtaaaagcctgaagcgctcaggcctactgattagtcaagtcgagctctcacacaaataggccaagcccaatgaaagccgctcaactgggcctagaaataaacgatttcaagcccaaattaaatagaaataggaggcacggggcccattggcctacgattagacggcgatccggtgccatacctcgtgacgaccggagatcgacgaccgcaccgacgaccgagatcccaaaaacggcggcgacgaaaacgctcggtgccatgccgttcgtggcgacgaggccatggacatttctacgctcctcatcaccggtgcctaacttcaccgtcaccggctaaatacagagtaaggcagcgttcgtttaggcttcaagatcatcaacaatgtcggagaaggtaatcggtttcatctatgctgttgaaagcttttgttgtttcggcactttcaaatattctaactgatcgcgaggagtattgtgcgccgaatccgacataggtggtgtgttgtgttggggggctcaataaaccagaggttctcgagcgatggtagcagcctgatttcttactcgttgaagccaatggatgaccatgctctggttaccttggggcagcgtaggaagaggtgctcaacatcttcatcatgggagtagaagtggcaactgcaaaacaaatctatccctatacggaagcggcgatcggtggtgaaaattcatcgccagtgcatttattctggccaaatttatcccatatgctgcaccggaaagggtcatcttgtaggagctgattatacgctaatactcgccttgttttaccattctctcaaacattccctaaatcattcttcggttaccaaagaccacatcttccttgatgtcaaaagaagaagaagatcacatcttcctccgagcattagtgaccgaccgaccgcaacggctgccatgagaaaaccaaacgcccgggacgaccacagacactggccgacgacgacacgacggtgaccacgaagctaccaaattctgaaggagtaaaatccgatcaggtagtatggccgatcaattattgcatctccccacacaccggtgaactgtcaatctcagagagatagactgcagttataaaaatctctgtccgaactcataaaattcatgagatatatacttcgtacatcatacgcgtatgaatagaaactttactcctccaccggagtatagtactcaaagaattgatgagtgcatgagctgttggaacagcctgtgtgataacgtgaggggtgtgtgtgtccaccgtttcccgttgtggtggacttgctgcagtaatgggagaacagctcactgaccacagcagagtgtagatcgtgtgactcgtgagaagatctcgttttctcaagtgaagatgtagcagagaaagtgtagcagtagcagtagcagaggagctggaccagtccttttcacatgctggtccatctccagcttatttacctgtttctactacattaagtcaattattagtgaaaccaaacctttcactcagatcttgtacctgcaaccgaagtactggagctgagacacttggatccactcatggttggactcacagtgggttaagtagaaaaaaactgatagaggaaaaaggataggataaagagagaatctttgatgagcctttacagatcagacaagatcccttcccaaacttgacggcatgcgtggtgtttttacctctgaaaagagaaagatgtcctggcgaaattccgaatgcgaggagcaaacaaaagagcacacgcacagtggcacagtgcggtggtggtggtgcagcacagcaagctcacatggtgatggtcgccgagagccaacaagccggccgatcagacgatgggatcaaacaagagaatttcctttccatgctgtgcacagttgcttttgcccccggtttcgcatcaccatcatcaattgcaaccatcgcagcttgtgttcttggcctctctggtctaatcgaatggactaatttgtaatgagattaacacactgtagtgtacagtttgatgagtgattaggtggtgtttgattgtcctaataggtaatgttttctttcgagtaatgatcagggagtcactttgctgaaaattgaaaccaacccggactcaaaatctcaaatgcagttaaaaatgaaaggaaaatttcttctcttcgtagcatatgggttttacaatttctcttgctgttggatgcaatcgctagttcgctaccaataacctagcaagcaaaaggagggggtaaaagaactgaacaaaagaatcatcttttttttttttggtttcattttgagatttgatgatcgaaatggtgatcatgaacagctcccgactctgctgagctgcctgctgcctccgacgacccagagcagcgtcctcctcgcgaacgacggccgctcctccgccgccaccgacgacacggcgctgttcccgccgcagctcccggcctcgacgtcccagtccttcgccgccggccaccggaacgacaccgcgcgcctctcggcggcggcgccgggctctttcttggacggcaccatccagatcttggacacggagaagctgtccttggcgagcttcgcgccggcggccgcggccgcgtcgtcgtcggggttcttgcgcggcgtcgcgcggaacggcggcaggcggagcgaggactcgccgcgcttggaggcgccgaactcgcactccgacatggcgccgcggcggcgcgacttggaggccgccgccgccggcttcttcctcggcggcttgatggacacgcggagggaggcgtgcgcgtccatgacgtactcgtaggatcccatggaatggcaccgtctttgcccgagaccaccagccttggcattggcgtcgccattgccgttgctgctcgtgccggctctatccccttcgccggcgatggcgttgacgttgaagaagacgttgccttcgacgcacatgaacttcccaagcttcacctcgaccacctcctccgctcccggcgcgtcttcgccaccgacgtcggctggctcatcgtcggcggcgtggaccatgtcgcgggagctctcggactcgagcaccatgacgacgggggtgcacgtcggcgagagctcggcgaggaggctcctccggcagagcgggcaggtggagtgggagaggagccaggtgtcgatgcactcgaggtggaacgcgtggctgcacttgggcagcagccggagctggtcgtcggcggcgaactcgcacaggcagacagcgcagtcgaacgggtccttgccatcctcgccgccgacgccgacgacgttccggtacaggaacaccgggagcgcgtcgatgaaggcctggtcgacgccggcgtcgtggaggtggaacagctgctgcagctgcccctcgaacgccgtcgcgctctcggcgtcctccctcgccctccgctgccggtgcagccgcagcaggtgccgcaccagcaggtgcagcagcccgcacacgaagaacacgatcgccaagacggccacgatgaacacgatgctcgggcttatcttgttctccacgccgtcaatccccgacgccgacgacgccgccgccgccggagtctgcggcggcgacggctgccacgtcgaattgctcattcttcaaatacgctctacgatccaaagatgaattttcttgggagaagagacgatttctagcttgttttgcgatgagctaggggtaggagaaggatcttggtgttggcatggcagccattggcgatgaagaaggacagaggacacacagcagcaggtgatggcgatggaagaaaaagaaaagaaaaagaggagcagtagcagttgcaggtttagggggaagggaagctttgtgtgtgagaagtcgtaggcgaattagtactaaaatgtgcaaggagggattaacttagcttattaatcaatgggcaagaaatggggtagctttaggtgtgtttaggtgaagggttagcaaccaaagcatgaggcgacatgcaaaggtgtgggtcactgtaatgtgaggtcatttggattgcaacaatagccagagaaaaaaacaaaaatgggtattaaaaagaattaatctgtggcatcgctgttcttgtagctgattcgctagcaagtgtagtaccacaggtaattagtaagctgtttttatgtgagcatctgttttttcgtcctcgacatttaatttctttgctggttttgtcggtgtcatgatgttgtttttttttttgaggtgttttgatcgagtaactaaacttggggcttatttttaatcttcattgacttttgcaggattaacaaattgccggcgcgtgtgatgtgtgatgcatacgccggccatcagtgtcccgttcaacgtgtagtacttgtgtggaggattctggccgtttttctttttgtagcctcgtgtactttcttcttgcactcaggttgcattgactggctattgttctacacccttccggctcctgctaccactacgttgtacagtattactactacatgcggtcgtgaaaagaaaatttttaggtattacatcggatattttttaaatgcgaataaaaaaataatttcataattcactataaaccgcgagacgaatcttttgaacctagttaatccgttattagcacatgtaggttactatagcacttatggttaatcatggacaaattagcctcaaaagattcacgattttcatcctaactgtgcacttagtttgttcatttatttatatttaatgcttcatgcatgtgtctaaaatgtgatgattttgggaaaaattttagtactactactaaaaatcaaatcgaaccatcgtatgatcagtaattcagtaactgtttatacagcagtggagtactagtagtactaaaattctactcgcttcgtcccataatataagggattttgattttttactttcaacgtttgaccactcatcttatttaaaattttttgaaattattatttattttatttgtgacttactttattatctacggtactttaagcataactttttgttttttacatttgaaaaaaagtttgaataagacgagtagttaaacgttaccagtaaaaacttaaaatctcttatattgtaggacggagggagtattgtagagcgagtagtaatcggagaggtactaggcaggtggtagccatgaaattctgcaagaatatatccacatgggtatgagaacggtgaaggaatttggtaacgaagtatcgtaaaagttgtaacgtttctggccgttttcgactctaatcatgtgtagaatttgatttctcttactattgtgttgcaattatcaaaaaataattaaaactgttttgctatatatttatggatattttttctcctaaaaattctatcatccaaaaatttgctaaacgtaaattagtataattgtaatgtaattatattgtaatttgtatgcaactttcatgtaattttaaatagtaaaatttgttttaagtttcgtgtaaatgaggaagaaaaaaaaacacatcatacaagtgaggggattcggtccctcctccccacccccacgactttcatttcacgaacacgatatgttaccacgatttttaaaagttacgtacaagttatattacaatgtaatgtatctacactataattgtaatatacttatatctaacaattttttaagaaaaaattcattgataaaatacataagtagtctctataattgtagttgatcccttaaaaatcggttacgtagagatgctaccatttcttactgtttttatcccttccatccaacatccatggctagctctctgtgattatgtgatttcacatcatggcaatgtttatcagttttcacaagattgcaaatttgcaatctgccggatccgctggtgctgatcgttggctgggcaccgacgccacacgcatacagacggacagacgcagcaggcggaattaatggctacacgatatgtttcacggctgagaaagagttggttgatagccagttttttaaaatttagaaaagctaagttcctatcttctaatttatagtttattttttagattctacaacaataacttttcagaatttaaatcaaaagctaaactgtttaataagtttttgattctgaaagaagcttccaaagagaccatggtgctggccgccatcatcactatccactacgaccttgtgaatggtttgatggcctcactctctctcaggtgagattagccgaggcagagagggagagcgacgatgcacaagcgcaacaggagatcagggagcaagaacaatggggcgcgaatcacgaggcacagattattcagatccagatacttcagtactccatgctgctcgtgatcgtgatggctattttgatgaggatttctactgtagtactcgacggtaggaggtgaatttgacttttgccagtttccagaaggcttttggcgaagcaggttcccaaaagtgccctccattaattccttgtccatgcaaaaggacataaaaacaggctgcaaatctgcaacctgcaatgcaaagcttgcaagtgcatggtgatctgctgcaatttgtgcatgcgatgccaaagctttctctctgctcttgtgatcctctctctgaggagtgctgaccactggtaagtcaacgcatggtccaacccagaattcacggtcaaactgaaaaatgtggacagaaactacagtgcgagtgacctcagtttactgcactttccctgctacagtgtcgtccatatttcttttattgtcattaatacgatctccacgatgttactgcttgatgcaattcttgcagtttatacacacgaattagaccgttactaacatttacagataagatatctccagcatagatcatgtgtgttcactgttgaagaaggtagtgatacagtggtgtatgtacctgcatcaatcatatcaacaatgagaggaaactagtcgagctcactttgcattggttgatccgtggatgcatgatgagtggatgcatgaccaaacgcagtgcagactgcagagtgcacaaaatgagccatctggcctgtgatgccatcggcagacagcattagctggcaatctggcatggaacacaggtagtagccacatcacagagtagtggtagcagtctagcagattagcactagtgcagcatactgaaaaatagatttatttgattttctaaaggatcttttatataaaaagttataaaaatgttttagtaggaaatgtgccgtttaacggtttgaaaagtgtgctaatggataccgagtaattaaccaatccaaaccgtagtttagaacatgccttgattataagctgtaacgcagctatatatatatttgtgtgtttttagtactccctccgtattttaatgtatgacgccgttaactttttaaccaacgtttgaccatcatcttattcaatttttttacgcaaataaaaaatacttatgtcatgcttaaagaacatttgatgataaatcaagtcacaataaaataaatgataattacataaattttttgaataagatgaaaagtcaaacgtttgttaaaaagtcaacggcgtcatacattaaaatacggaataagtaatttaaaagttaatgtcggtgctattgttcagggcctcaggccacctcaacttgtcaaagctgaccaagaacaacaaagtgagcttctcgaatctcgacctaagcactgtactacaaatttcttccctgtttttggggtgttgacattggaaattccctagcactactagctgtagcagtagcatagcaagaaggaatgagtattttgtttacagtgttgaggccatcagaaattcagaattcagtaactcatgccggcaaaaacgggggtccatggaccatggcctagaaaccaaggcgatcgaaccttccgaagtctcctgttctctcctcgagcttgatggaaacccatgggtccttgggatgtgagaaccttgttttgcatcgatgctaattgttcttctgaagagtaacaatgggtttaatggcctcgggattctctactactctcttcagattgtcttcttctttcttgagattattcagattttcagactgtcttcttctcaatttttttactagaaggagagtactgttactgaataaatggaaattcagcatcaaaattaatacctggatatttatagggataattattatggttgttagcaggttgtgtgcaagatttatgcctgtccaacaaagtgatagtaatgcatgctactcctacttctgtttcttcaggttcaggttcagtatctgctgatatatcactttatgctaaagtgccacagctctagctcgcaacgaccattagccgtgacacagatttgatttggaataataattagcagtaggcaacaaaaaagggtggttagtggcagtgcagcccttttgatcattagtttggtgttttggcaccttcacaggagggatttaaatgtgatttggtggcttaataattggctttgttagctgctagtgttgttctcttctgcatcacaattcacagagcgcagggaccgagtggattgcttgcaagcagttctaaggagttgcagccaaatcatgccagtccaagggaatagtatatactgcatgatcattccaggataaactatatatattttttaacatggaaaagtatagtgtttacaaggagataagacaaaatggtctgtggagaaatagtgtctgattgattgtgatttctgtctttctttaaggaatacgcaaaagatttgtgtatcatctcattaactgcattattaagggtgatttgtgtcttctgctggaaggcttaagtagtactccatttcaagctttcagcctttcagcccggcccaagacttggtagaaacttcccaaaagatcagcggaataagatcactttgactccctcaacggaccaccgaatctaaatcgtatcccttaatcgcaataccggaaatcttgacccccaaactgtcaaaatcagtacagtttgactcccttagtggttttggacggcggtttcgctgacgtggcgcacacgtggcagtgttgacttggtcttcatccaacgtggcattgacgtgacgtttatgtgaaaaattatatgcggggcccatttgtcatttacacagacaaaatttgtcatcttctctctctatccttcttcttcctcctctctcccttatctctctctctccccttgacatgagccggcggcaggcgggggctcgagtggaggcggcggcgggcgagtgccaggcggtggacctcgggcgacgggcgcgggagcaggtcctccttgcggatgcaaagcgggcgctcaaggttgcgcgccgcctccgattttgcggtggtggtgggcacgtctcagcctcaaggcggcggcgcgaagcgaggagtggtgatggatgctcccgaagcaccgcaagtacatctgtgaagctcacgactccagttagcgcgccactgacctcgtcgacgacccagacgtacccgactcggtgcgcaagagcctacgccatgattgccaccagcgagctcccagcatggcatgtggcgacgtcctccatcgacctccaccataagcttcccgacgaagaccttcttgcacgccgcgcacgcccataaggtgagtcctcgtcggacgatgctgacgaggaagacgatggggataacgacatatatgaggcagtgttgtcggccgcgtccatgaggtcggccatggcgtccaggccccctgtcttgagctacgcactaatggagcaaagcacccgcttgtagcacacggccgaagaggatggggaagcggctatcgtcggcggcgcagcagcgacggccatggcgcggtctatcgggaggaggaaggaagtgaggggctgatccggcctccgggtccgcaactccagcggtcgcccgccgctgccacagcttcggtccccgcccaccgtcgctgctgccgatccggacgccgctccccacgctgaagagaaagagggagagatggagaagggaggagagggaggaggaagaagggataaagagaggatgacatgtgggacccacaatttttgtgtgtgttaataacaaatggccccgcatatattttttaattttaatgccacataagcgccacgtcaatgctatgtgggatgaagaccaagtcaacactgccacgtgtgcgccacgtcagcgaaaccgctatccaaaaccaccaagagagtcaaattgtatcgattttgatagttcgggggttaagatttctggtagtgcgcttgagggatacgatttagattcggtggttagttgagggagtcaaagtgatcttattctaagatcaggacaacaaagtaaacggtccgtccaaaacctggtcctatttttggttaggtgcagttaggttggcctactagtggaacggtccaatattgaatttgtaccaaagtagtacaacttataaatttattgaaattgaaaatgactggaaggaacgtaaaagcaagttgccatattaactagtactccattcgtttcaaaatgtttaacactattaactttttaacacatatttaaccgttcgtcttatttaaaaaaattgtgaaatatgtaaaactatacgtgtacatgaaagtatatttaacaataaatcaaataatatgaaaagaataaataaataattaatttttttaaataagacgaatggtcaaacacatactaaaaagtcaacggtgtcaaacattttgaaatgaagtgaagggagtaataaattcctgaaaaaattctcaaggtggtggagacgatgcaagatggaggcgtttcaacaataacgtcagcaacgattttacatgaatgctatattttgatatatgattttgttaaagtctccgactctccgagcattaaaattgtgtggcatatgttctagctaatcatccttttaaagttgaagatttcttgtaattgggttttttggctcctattttcttgctgaatgttctagaaaacgatgcgactatgtttacatattaataaagcgtgccaattggtttataaaaaaagtttccttactagcgagattgtttgttcaatagtgtttttattacgagtcatgactcgcgacaataggggcatattttgtttgatgctcaaaattaccattaaaaaaaaagcaatgcccccttccaaaaaaaatgtatttggttgctacactacaacaatataagggcatgtacaaaggtagagtcagatatgagctctacgttatctagagactaacatcttacaacagttaaagacaatatggtctctaatcattaatgtataaaaatacgttttctttctcttctttccttactttcaccacaatgcaacaaaatttgctctaataaatgctaagagtcgactctgaaccgttgtcatgcataacaaccatactcatttctctttcttccatgtcatcaaatttacttgcatgacaataaagagaccattaataaaaaccgttatacatgccctaaaaatgagaacctaagcacttggcaaatttttggcatcaaactaaacagtaacttcttaccaaaaaataacaaatgccatattttgccattacaaaatttttgggaaggtttgaaatggcaataaactaaacaagtcctagagtttcttcctgtcagatattattttggttaaaatttaccatgtaattatcactccgccaatcaaataatcgtttaacctcttatcttttgctgttgccttatcagttacaaccaattttttttatagatgattttcattatagtttattttctatcatttgtttttaattgctaggaacataaatataatttttacacattatttcgatcaatttttttcatagcttgtcagagacagagcaaaggattttatctaggcagaagtgtcttattaatatttatccagtcttatatgggtttcgatgtattgaaatataaacagaaaagagcaaatgagtcatatttacagttttccaagtatattgttctgaaataattagcttgatacataaaaacaacaatacaatatcgtaagtcagaataaatattctgaacagatctagagaattcattataacaaatcagatatacactaggcacaaaagtaagaactagtagagcactatgtctaaaaaaaagtgaagaccatggaaacagctcaaactaaacaaaaaggcaacctgaaagctatttcttcacgttggaaaatctaaagctatagcagccatcatctgcaatagccattggctgtcatctgctttctccctcgttaattaaaatccaaacacccaactcatcttaactcgtgctaagtactcactgtcagggttatggataccacatacctaatagtagttgactaaatctcggcaggatccattacataccatgtcttatacggaaactgacctcgagggagttctggataaggaaagacaatcagagttctacatggaaacgacaacaactactcggattgtatccatattggtttccctagttctacttggacaaggggacacctatgggtataaatacaggaccccctaggaggagaggggggacaagacaatcaacacccaacgggatcaacactcgacaggatcaacacccaacacaatcaacatagaagcctacatacgccaagacacgccgccggatatcgacttcagggataagcacggctaataccctacggtgtctccgaatactgtcgggagaaacgaaagcgctatctctgatctcgccgggcacggattcgaggaggaaggctaccttgttgtcgactacgagtcagatcgtcagaccgccatgtcgacaacagttagattggctaccccaaatattgtactcgtgtgattatggtgaataagagcaataccggcttcggccaacagaatgtagggttattacctgacaactcaggggcccgaacctgtataaaaatccctgtctccatctcttttacctcagtcttgcgtatatcctagcatcgacgatccccataccatgcaaataccagaattgcgacatcaaacgtcgacagtggcgcgccaggtagggggattttggtgcttcaggatttcgacgagatgggtttaagagatggactctccgacaacaagctactcgacgacttcggctgtggggagatccaacctgtccaagtacatcttctgactagatcggaaccatcatcgtcatcgacaacttggtctatcgagatcatccaagcctcaagctccgcggcgtaccaaaagatgtcagatcgcctgatatcgaacgagtacgcagcaaggtaattggtagattggttttttaaaattgatctactaatttcgtagatacatccggcatgtatctacaaaggtacacaatattttatctgcaatttatcgtacctattcagatcatacagtattgtcagatccataatttattatgtttacccagagcacgctttttatacaataatatctgttgcgcgggtgtccctgatgttaaatcgactacgatctaaaggtgggggctcgctctgtcttcttctgtataagtcatgcttgttacataatgcctgatatttacatctgctcgttatatcctgatattactagaagatccatgcagtttttagtacatactcgatattctctgctatatgtcttgccttctagaaaatatttttcagcaacatttgagcactcgagtaggttatggtcgagtacaccccactatcgagaacattctcgacaaatacggagtcgtcgcacccaacttaccaacgaagaccgacgacctatctcataacaccggccatggctggactactcgagaaaaggtcgttaacggataattcctcgcaaacgccgtcggtttaatcacccgacatgattgcgagcggacatccggatatgctataagttgggtatgtgagtcatgctggccacatgatatgcacatgtaataaactaactttagcgcccctataggtgattaaaagactcctacttctggttctcgaaccagtaaaacatagtgatctctctcgcctcactttaagtggttgagtcacgactactgcatggtcctcgaccagcgatgtagcgtttctcccactagttccactttaagtggtcgagttacgactactgcctggtcctcgaccagcgatgtagcgtttctcccactacttccacttcaagtggtcgagttacgactactgcctggtcctcgaccagcgatgtagcgattctcccattacccctctttcaacaaagttgatatcaggtgcataagatcgccaagtgttttacccagagatcccttacccagatgacacctagcgttgaaacctatcctactgtccctttacgccgtcttgacaaggcctccgaggaacctaagggaacttcggttggggacgcccagagccgataaggccttgtcggatccttcagagacgaaagaccatgtaagatctggtcatgtaagagttctcgccgtgcgtattaaccaagctgtgtaatcggaaatggattttccaacttcacagctgggggctaggatcagtgcttgttcaaccgaggcaggtcaaaggtccaagagccttatcttctgagaacgattctccgacgacaaggctgggggctagggagagtgtatgactctacaaactgactgatcggagtcggtaagagagaagacgctcatatacaaagcactggtctgtacattcaattcactagtctgccatattataacatgtcaccctttgagaattcgctcgggggctatttctatctaatattcttttctgagtattgatttcaggaaaattctattcgacattatcgaagactccatgtctctatggttctacaccaagatcgactaaggcgagtacgacaaatgtcgacaaggctccgtcgcagactctacgccttctcgatcactcgagaacggttgctggatctcgacaaagaatacggaatgaagagatggtgtacccgccgagataaagtttcttgacttcaatccaaattctcgattacagcaagacgggagacttagtcgtacgctctgtactttctcggtcgacatcagagattgacttagacaaaccctttcggtgcccgcatgaggctaataaaggaagtctaacgttatctctaaactcaccgagaacggtcatgtgagctcgataacagttcctccaaagtctgcggttgagaatatgaactcgttcatttgcatcgaagtcgggggctactgtcagagttatggataccacatacctaatattagttgactaaatttcggcaggatccactacataccatgtcttatatggaaactgacctcgagggagttccgggttaggaaagacaaccagagttctacatggatacgacaaggactactcggattgtatctatattggttttcctagttctacttggacaaggggacacctatgggtataaatacaggacctcctaggaggagaggggggataagacaatcaacacccaacgggatcaacacccgacaggatcaacacccaacacaatcaacatagaagcctacatacaccaagacacgctgccggatatcgacttcagggataagcatggctaataccctacggtgtctccgcatactatcaggagaaacgaaagcgctatctctgatctcgccaggtacggattcgaggaggaaggctaccctgttgtcaactatgagtcagatcgtcagaccgccatgtcgacaacagttagattggctaccccaaatattgtactcgtgtgattatggtgaataagagcaataccggcttcggccaacaggatgtagggttattacctgacaactcaggggcccgaacctgtataaaaatccctgtctccatctcttttacctcagtcttgcgtatatcctagcaccgactatccccataccatgcaaataccagaattgcgacatcaaacgtcgacactcactccatctcaaaatataataatttagaatcgaatggaccaaattgctagtattagaaaatgtctcatttagttctactcccttcgtcccaaaatataacagcttttagcacttatgaattgtctcaaaatataacttctccaccaatattcacttcctaactaatcgtaaccctccaatattcacatttcccacctatctcgacttctcaaccaatcacaactcctttctatttgagggctgctacctcacgggatcccgtgggaacgggatgcccttcgcatcactcggggcgacagcataacgccgcatatatccccgaagtcgcgcacctcacccccacatgcaagcttccaacaaagctgtgaagccacgcgactcttcctgacgtgcgtcggccgccacttcgagctgctcgtcgaggacgtcgcccacatcgagtttgtccatgttcccttccctactgcaatacactgccgtcatgtacaaccacactacgtaccttgccgccgctaccgccggccatctcgatgatgaaaggtatcaagcctaatactcacatgtaccaagtatggtacctagagtaccaggtatcacgggtaccgggtactaggtaccaggtggtacctggtacccgttgtcatggttatggataccacatacctaatagtagtcgactaaatcttggcaggacccaccacataccatgtcctatacggaaacagcctgcggatataggaggagttccggataaggaaagacaaccagagttctacatggaaacgacaaggactactcggattgtatccatattggtttccctagttctacttggacaaggggacacctatgggtataaatacaggaccccctaggaggagaggggacacacccaccatagacgacacggaacatagatcaagacacaagatcaacatacaagccaacatacgccaagacaagacaccggatatcgacttcagggataagcacggctagtcccttacggtgtctccggatactgtcaggagagacgaaagcgctatctctgatctcaccgggcacgaactcgaggaggaagactaccctgttgtcgactacgagtcagaccttcaaaccgccatgtcgacaacagttagatagactaccccaaatattgtactggtgtgattatggtgaataagagcaatgaccggcttcggccaacaggatgtagggttattacctgacaattcaggggcctgaacctgtataaaaatcctcgtcttcgtctcttttacctcagtctcgcgtatatcctagtaccaacgatccccatactatgcaaataccggaatcgcgacatcaaacgtcgacacccacgatacctggtacccgtggtacctggtacctggtagcctggaggaggaggaggaggagagagaggataaggcagccgcgtggtggagcatggaggcaagacgacggtagcgcgacacctggaccacaccttcgagaaagctcgtgtcggcgcacctcccgctcgtggcggcggcgccgctggtggacgcgctgcgcgcatcgcttgccgagccgcttatgctcctcgacctcgcccgccgcctcccgctccggctccaccggcgaggcttcgtcggagcgcggaggcgaagtcatcgtccgcctgcgagacgtggagaagatgaacagctcgtgcggggcgttgtcggagcgcggaggcggagtcgtcgtcgccgccgctggccatgtcggtagggagctgagttgacgaggcatggaaattatctgaagagagagcgacaaacagatggggctcgggtggatgagcgctatcccgtccccacgggataccgtggtttagtttttctctttctatttacttctaaaacatcaatataaatatatatatgtctagattcattaacatcaatataaatatggaaaatgctagaatgatttacattgtgaatcggaggaagtactttattaataactgtatccaactctaaaactctctatattttgggatggagggagtagttattattttgggatgtaggaggtagtttatacaactgattatctattggctcttgttttaattacttcctgttcctgtagcactagaagattttgggccaaaagaaagaaaaacatcatctttggccactacctgcatctccacgtcgccgtctccatcagatcattattcctttctccttcctgtcccttgtcgccggattgcaacaacgagtgcattttcttgtgaatcgcatcggcgttgtttgcaccccgcgattccccaatccatccatccagtcccccccctcgctggaatcgtgggtgtggggtgggttctgaggattcgaggcggcaggtcgcctccgaggattcccccttcgagttcgaggtcccttgttttcttgcgaggattgggggcctgatttagagggcgttgtcggtcggtctcggttttgcatttcttccagctcgggaccgacgaccctgggcgattcccgaggaggagtgagttccactctgatttcttggtgtagcgcggaaagttggcttttttgggtcgaattgttggtagtctcgctgcaattggtaggcgtcaagctgaaatttcccgtcaatttgccgcttcccgtgatgaatttgacgattttgcaggaaaattttgggctttctgaaccttggggttaaagatcgtcggcatgcctaaagtcgggagcttgatcctgtctggtgatcattcttgaatcgaatgcggtttgggcggcctcgtggattgggaaatttcagggtgaagtcttcgattcgaggccttcccgtgcacgctaagagaggagatcctcagcttcgagcatccatggggttcctcagccttgtgggcaactcatttgggtgctcggcttccggcgagcggctcgtctcggcggcccgcgacggcgacctgcaggaggcgcgcgcgctgctcgagtacaacccgcggctcgcccggtactccactttcggcggccgcaactcgccgctgcactacgccgccgcgcagggtcaccatgaggtgatgccatttgtctgccaaaaatgtagctgaagtatcagtgcttctgtatagatgggtaaaagaactgcattcacattgtctgttgcttgcatgttcagattgtttctctgttgctcgaatccggcgtcgagatcaacctcaggaattacaggggccaggtaaaccaagatttctggtacatttactcgtttaagtttcacttgcgaaatgctatggcaatatgctataaattttcattgtatgtagactgctttaatgcaagcctgtcaatatggccactgggaggttgttcagacactgatgcttttcaatgcaaatgtgagtattttgcttgctgttcactgagaaatttctagtcgcttggatatctaatcctgaggcattggaacgtattttaggttcataggacagattatttgaatggcggtagtgctctccattttgctgcactacatggtcatgcccggtgccttcgtcttgtgcttgcggattatgttcccagcatgccaaacttctggaactcgatgaaggacagcctatctgaagaaggtccatctgctgatcttgatgaagagtatgttagagccccttgattgtttcccattggtttattggttgttaaaccgaccatgaatcattcaaatagtatgtctgtgttagcagtggtttgttcaagatggtaaatcagaaggcggatggaggactgactccgcttcatatggcagcgttaaatgggcatgtagagtgtgtgcaattgttactggacttgggagcatctgttattgaggccactattgaagatggaacaactattgacttaataggtatttttttgcaactttaactttcctttctgtgcttggtgtttttcaatttgataatgttggagcacactcttagggcatgtagcgcttaacatgtttgaatgtatcaccaagttgtccatactatctacagttcttgattcttccagctttctactctgtttatattctcatatatctagatgtaatattttgttgcttccatctgccaggagctggtagcaccccgcttcattatgctgcatgtggtgggaatgctgtctgttgtcaagtatgttctgccagtctgaaggctttttcataatttaaatgtttgtctagttttatcaacatatctaaccagaagctgtttgatgcagcttcttattgctcgaggagctagcctttctgcacagaatgctagcgggtatgattctgaagttttgatacatggttaaagagctatcttttttcacggggcatagtgaaagaactatcactgtttctgttaattttaaaacctagtagttaaaagcatatgtttcatttcccttatgcagctggaccccgttgatggtagctcgctcatggcataggaactctcttgaggaaattcttagcaaagaaccagagagtcgaatacgcactgttccttctccatatttgtgcctcccgcttatgagtatcatgagcattgccaggtaaggttgctgctaaaatatctttacttccttttccgttacatatatgagtagtagtactaaagtactggtcatgtttgtaatcattgacttgcttagttattagtttgctatgacatgcttagaccaattcgtttactctaattgtgcagcattgataagtattatcctccattttttaaaatttaaccatagtgcagtgcttttgttggtaacatctgatagttccattgcaatttattttgcagggaatttggctggaggtacctaaaccaatcacctgtatgtattgacccatgtgctgtctgcttagaaggaagctgctctgttgctgcagaaggtacacttccaaacaaacgtattgcttatgtgttattgtcgttgaagctaactgaacttttagcacgaaaagtttcttatattttaaacaagggcattaaagtagtactgtcgactaccacactagcattaatatcataggaagttcgctaattatttcaccctttatgttctggttcataagtcataactagtaactcagcagctataaaaagtaatccagtgcacttatccttacagttaaaccaatatcagcagccgataaactgaaccttttcaactatgttcgattatgcaggatgcaaacatgaattctgcacgagatgtgctttatacctttgctcaaccagttacacatcagtgagcccagcaggtgccataccatgccctctctgtcgacacccaatcatcgctttcactgcgcttcctgggacaagcccaataagagagctcccaagaaacagtctttcattgtcattttgcaccacatgcccagctgtgaactccgattctactccctcaatcgccagccatctgtaccggactgaattccagtgtgcacgcatgccacctatgggttcatcctccttccgttccttgagctgccagaggttgccggcgatgaagcttaacccgtcgttttgtatgggtgctatggatacaaatccctgcctaataagatgctcaaggttcggacctagctttcgtcggtcggcttcccaaggagaaagtagcaggagagcatggcctctaacctttgatccaattgctgccactggtagctgatacctgatatttcctcagttttgtgcccattttgaggtttaccatgtatattcattggttgcattggtctggtttttgccgatgtgagatgaacttgctggtcccaattccttgttgatatcagtagcagcatgtaactactcctttctcttgtctgtaaataacctttgtattgctgtgtattgtccggaaatgaagaaatgaaatgcggatgagttgaattattttcttctctgcacttttgctggaaaccaatgattcagattctgttagtggcaggcatgaaggtatcatgtgttgtggctggtacagtacaaccctgcatgttctgtgtgtgtgtgtctctgctgcttttggtggtttccaataaccgtccatgtgatgctcttcacgtagtacaggtttgtttattgccgagttctctgcatcaagatactctgaagcagatctttcggactggaaaaagatggacattgcatcgacaggaggacaacgataatggaagggtatatgcgacagatctgtccatgccaactgcactggtctactcttttctgcagtttgcaaaagtttcagttggcttgctttgttgctactcagtttgagttattttagctaatcacctgataaaatgacaacgtaaagtttagccgtgtcccttgtgggtgctttgatttccaacagctactactagctggcaatgaactctgcaagatcgccatggggagggagaagaagctggccggctcgtgacccgtgggctagccacctaaaacgacccaatacggctcgtggactaaggcggcccaatatggcgaaatttctgtagcggccgcgtgccaggagcccaatttctgccggctcgcgcaagcgcggcccaatccagctaactttttatgtagtttatttatggattctattactatatataggcagtgaaggttcatgggaaagtgatcatgggcagacatatgtagggttcaattcatgatgatggaaattaactgtgctgcttctgctgttgtactgttattagcaacgtgcatggtgggccagtgctagctagctggagtatatgtgtgactttggaacatgccaccattcagggatatacagagaattgcagaagtaacatgcgagattggaagtaagcagttggttgttgcaaacatgcacacaacttatgcagaaaaagcaacccagtcacggtgatgcactgcacgtaccgtgtactcccttaataccgaatatgacacatcttaccactacgaatatagatatacatctgtctaggtttataatactagcggtcacatcgtttggcttttatatatgggttcatggtaacttaaaaatgatttttgtaggtaaaaacttttatatgtgttcatgttgacttaaaagccaatgcggaaaaagaaactacgtttaaaatatgttaaaatcaatcttaaaattaagtttgaaaatttaaaatttatattttttttctttggctgattattaggccatttgatgggagcttagaatatatcacaatcgattttagatttattttttacgtaacggagagagtaatactaccgactgtgcgtgcacattgagcaattgacaaaagactactgcatccacgggaaactattgtaaatgccagcagcgcgccggtcgatgtgacaagtgctgttactacttctttctccgtcttgttgaggtgaaaggagatcgtggctacaagacgtactacagccactactacgacctcttgcatgcatgtgcctgtgtgcttgggaccccctatctcttgatcggtgagcgattatatgatatcatgatttgattgatcctgagaagggttttttggcataccgttgagtttccttaatttctctctgaattttaacccgttccatggcattgatcagatgatcaaaactgtgagctttcctccgatccggccccctgtgctggcactggcagcaggcgaccaggcgttatctatctcgtggccgacacaggccttgttcttttttccaacaaaaattgaaaggaaatttagatattcgtgacacgttatttaaactgctaaacggcacttcagtcaatataaaattttcatatgaaaattttttatatggaagttgctctaaaatatcagataaatatatttttcaagtttgtaataattaaaactcgattaatcgcatattaacaccacctcgttttgcataaaacacttaatttttatctttatctacataagtttcaaacaccaccatggtcctacttaattctatatatgcttctgcttaattacctgtgatgtgaatactcacaactgtatatgtgaaggtgaatttagcagtcgatcgatcgcttaggtaaattggcgaacagacgacactgcacatgtactcctagctagcagttggtgctgtggcgtttgagaaattcagaggctggagatggggtggtgctcgtgttcgctggtgcgtgcatgttttccggatcatgccagagcccggccccggcctgcactatactaagctgcctatccctttctagcgaaaacgaggtaaagctgggaaactattttaacagcccgagtggatggccacccgtttattgcatgtcatctaaatgtttatgaaaaaaattgaaaaaatatgaataagatagatcaatatgtaatgcatcaatccacaaacatgcaagttaaaattcaacttctacagattgtaacaaaaataacaaacaaaactcaaattactatatgtatatttacagttaaatttgttatttttgttgcaacttgtagaagttgaattttaacttgcatgtttatagagcgatatattacatattgatctatcttgccaatttttttaaaaatttttcgtagccatttagttgacatgcaataaacgggtggacgtccactcgagctattagaatccatccccagtaaagcttgccttgtagcagcaaaagcttcgatcgattcgctcaattaattcacatgacaaaaggacacaaaccacatgcgtgcaccaaccgatcgatcgatccatcatcgatcataggtttattggtttctaagctttcaatccatgctcgatcggtcgatcgtgttgcagtgcagcatgtacgtgtgctgctatctgaatatatatatgcaatagtttaatcagttcagcatgagcagtagccagtagagatcattgatcaattatgagaacaatgctactagcttgcatacgtgttactaataggcacacacagttaattagctgctgatcaacaattaatctagctagctcgtctcaagagagtagggaagaaccaaagcgaaattaacaatgatgcatatatgaacactactcacatcacatgctcgccaccaaacgcactagtcgtcgtcgtcgtcgtaatacgaggagggtgataactgataagcaaacaaagcatcccgctaatcagggggccggccgggccatgtgtcgtactgcctacacgtgtactaactcgtgtagcttatcatggccatatccatagacgactgaagcttaattaatctggagcagtagtcgttaggtccttccgccagttaattctggtcaagccttcgtcgtccttttgctacctgcacaataacacaccccctctcccgcgcaaaaagaaacacttaattatgaacctggacgtaatttttacaatggtattaatatacaatctttctacgtgttcgtgaaaataatttgtataataaaaatagttacaatagatacacagtaaataagttttaggcttttcgcgttgagggatagaaaagaaaacaaaaacaatatatcaagtgacgggactagttcccaactccttaaaaaaatcacctaaattaaaagctaagataaatcatatagattaaccagtaattctacagttactacgctatccaaaacagaacaaaacacacttggctatcaattttaagagtatagtattactgagcatcagggattaaatggaataattaacgagtagacatgagcgtaacatatataggattaaccagttgctataaggtagacatagccgatgtctagattcgtagttagaaaccgatttttttttaaggatgaatggagtatggagggcatcggatatatatacatgtctgcagctaggttgttctacggtcgattcagatagtattttcagacgacagatcaggcaagttgtcaggcaagtgtgtgcacaaatcagccccaggccaaggcaggcaggcacgagagcgtgctatagctacttgtaagattcatgcatgctacccatcgactacgttacaacttgcaacactgttcgtacggccgcgtctcatatccagccaagggaccccttccccccacccccacactactctcaacatttcggccttgttgcttggattcaatccgggccaggaatgataaatgtagtaaaaaatttatgatagatacaatgggagaccgggatttatttcgggccgaaaaccaatttatttatgataggaataataaaagatcaggaatcaatccactagtcaagaggtgtggaactaattctggtctcttagagcaagtttaatagtacagtcgactactagctccaatttatctatagtcaatctaatagttcattcatacaatagttacatactacactattaatacatggtcccacctgttatacacacaatgcgtctttgagtccgtgctacagctggctacaaatctgtagcccgctgctcttctctcttctcatttatctccttaaaatatgtttgcagctggcttataacctgctattgtacctgcttttattgtccctatcatgagtaaattggttctcggcccagaataaatttcgatttcgatctcttattatatctatcataaattttttaatatacttttcatttcccgccgcgtaacactgtgcaactgtgcactgtgcaaccgaacagggccttcaggggcgttgcactgtgcaactgccactgcgctgcttgcattgtctctctctctctctctctctctctacacgcgcgcgatcgagtggtattaaactcactagctcagtgcggcatgtgtgcgtgggcgtgggccgcagcgagcgcgagccacccatgtgcatgcatgtgcattgtctcctctcgatcgatctctcctcctagccaatactcctctcctagtcctcctagtcctagctaaccttcttcttcttcttcctctctttccctatagctaagccaatataatggagacatgggctcccctctcctctcgtgatgatagttagatagctctatctctctatttctctctctttccctttctctccaactcacattccagagatcttatccaatgaacctagctacatacatgtacgaaaagatcatcatcatgatcaacgagtagatagtacgtgcacgcataattgatgcgtatgcatgccaatgcctacttatatgtccatgttgctccttcgattctgatacactccctcccatccatttccatttctctcgttgtaggattaattcttgctccatttcaactttgctgcaacacgtacacctaccatagctagcagctgtttgagcttgcttggtcaccaccatgccttcagctagagtgcaagctggcggcggcggcaacggcggcgccggcggcggcggctcggggaggttcaagcgggcgctgctccggaacctcatcctagggctcaggaagggcggcgtggcgtccggggagatgggtttccacgagaggaagagcgccatcaagcgcgccgccgacgccgcgctcgccgccgccaggggcgccgcgccgtgctggagccggtcgctggcggcggagctcgcgcaggcgccgcagcagcaccgttcgccgccgtcgccgtcgccgaggaagatgatctgcaggaagatcgtgaggaggagcctgatccgccggcggcggcggccgatcaggccggcgaacaacaccacggcggccaccacaaaggcgtacggcggcggcggcggcggcggcggtggcgtcgcgagggccatggtgaggaagagggcgagcgtgctgaaagagatcgtgccgggagggaaagctctcgacatgtgcgcgttgctgggggaaaccctagactatgccgtgtctctgaaagctcaggtcgatgtaatgcagcttcttgtgaggactctccaagaacaaaaactcaaaaactcaggtaattagttaattaattaagctactcgatctcataaactttcctcaccgtgcttgcattgcacacacccatgcatgaactaactgagccatggatatgcatgtgttggtgttaatttgcaggtaactagctagctagtaactgctgtttcatgtaacagtagtagtactgaagaagaagatgcagtgaggaagacatgatcaataatcaattgatgtaagaatcatatgtagttgttgttaacttcccctcctcttcttttctctatctactatatatatatcacttcttctttattaattagcactgagagtttcagatcatgcatgagtgatgcccgagttgagggtaatgtgcatatgtaagtatagtgtcatgtaacatatttgtcaggtgattcgatctttttcttttctacaaattgcatgcaaaccttgtatacatgtctacgtacgtaacagctatgtataaaggatgtcgtaacgtatgtgcaattaatgaagcagttcttttggtacaagtgtctcttcactgtatgactgtatgtaatgcatttgttctgttgagagtacggcaattatctaagctaaaaggaagaatgacagtactcccaatactccaaacattaatccattaattaaggtgcaattaattatatttttctccatttactgcttggtttggtgaaaaaaacacgaatattagggaatgatctaatatcaaataattagaagaggtgaggcttcgaacccaagtcatctagcctaatgtcttgtggagctagccaaaaaatctctaagtgtttctctgcgtgacactactcaagtgcttgagctgagccaggtcagccaactataactgaagacaagcataatcgcttttcagttttctccatttagctatctgacacctgacagagagtcgatgctctctcacttcactaaaggggtgtttaaatccatgggtataaagttttagcgtgtcacatcggatatacggatacatttaaagtattaaacgtacactaataacaaaataaattacagattccgcatgtaaactgcgagacgaatttattaagcctaattgatccattattatcaaatgtttactgtaacaccatattgtcaaatcatgtagcaattaggcttaaaagatttctcgcaatttacatgtaatctataattagttattttttttatatttaataatgtatacatgtgtctaaatattcgatgtgatagggtgaaaatttttattagaggatctaaacatgccctaattacaatattctttctgacgtccattgacagtcagagcctacccacagtccagtacagtagttgaagcttgaaggctgatgacatgcttgactcttattgccatctgatcgatatgattcgctgggtttattcaatgaactgatcactgtgctgttcacattacaattgcctaaaccttatccggaacactagcggcagcgatcagtggaacgtacagtagtcagagtagtgatcagtagtcttcagtttatatatttatatatagctatatatagctagggcttatttctaccacacaccatgcattttgactaggagtaatattaattgtttagccgataaattaaaaatattactattttctagttcatctcaactcaaaacgaaaaataaataaatctagctgatagggatggggagatgcgtgtcggaagatatagcgaaagagaagcatgcgaggcacaggcagatgatggcgatatatacaacgacctatgcaacggaggaactcgtctagatgaaaaattaagctcccagaaattaaaattgaaaattaaggacgtgagaattgtcgacgcgtgtactctacttatgcatgcttcatgtgtgtgtggttttactcttgattgaccagcttcatagtacttttgagtctttggcaagtcaatcgatcagtatatgcatgcatactctgtatgtcttaattagctactagctggcaatcatgatttaggtcgttggtcgacttgcactccatgtagcaatttaatttgtctgattagttagtttggtcaattgttcctcgtgtatcatatagaactacctagctagttcacccaaaccatatgactattacaactatatatgtggcatcaacgtactgatcgacctgtgagtagctaattacccattattagtagtagactagtagtagagcaacatggaagcagagccaaccgaaaccaaagacaaccaaatttatgacgggtgcagctagcgtactatctaaaaaattcagagtagcttgtcacggcactgtacagcagtgcaggggcatcgctagttcgctactaatactgcaattagacacaacaaccaattaataactgacactgtcatgagtgtacataatactagctaggagtgtcacgacgaggcttcaccctgacgatcgagacgacattgcatacaggattgattggtattattagctgtagccgatcgatatatgtagagatatggtcgatcgatcggtcgctgtccccgtttcagagaggcccagcgaaagtcccgtttgccctctgctccttccacctctcgatctgcacacacacccacacacaaaatcccaacgccaaacaagaaacacgcatgtgagaattattcagagttgtcttcgcaaacagctagcttagctagggaatattgcatgcaatcaagcacagtttcgaacgatcaagccagtgaggaacagtgctactaatcgaacaaaaatggcactgcacagtggtagccaggaccaagctgcgatcgagtattgtactgtacactctctgtacacggcgagtttattagctatagctagttcaattccggcgtgtaaataaatggccgtgctactcgcgtcgttttcgtcagcatgctacttggctacttgtatggctagagacctactagagtgcatgtatcatgcctgcttctttgcatattgcttggcttgtgcatgcatgcatatattctgtccaggatgaaccactagcagtacactagccgcatgccttgtcttgactatatatatctacatctacatcttcacggaccacacatagatatgcgatacatatttttctttgtcgccatttgagagatacttcttccgttttatattataagagtttctaatattgcccacatttatatacatgttaataaatctaaacatatatgtgtgtctagattgattaacatctatataaatatgggcaatataatgctagaaagtcttataacttaaaacggaggaagtaggaaggagtacattgatcgatctcgatctctctggtactgtattgtgtactgctactggttcagagtacgtgatatagaataacttatacatgtaaactatcttatgtctcagtttcttgtttaacaaattattaccgtgtgttttataacagaagccgaagatgtaaaatatttccattagctataagtacgtacccattccccggggcagagggatctgtagcacttggcatacttggtgcactcgtcggacccttcacccttggcttctatgcacctgcatacagaattatagataggatttacgtaccatatggatatgagtcatcgtggttacttcagcttcatgaacatgcgtgctataagctactaggcgtgcagatgaaacatcgctatatatatgtactgtactcctatctatcaatctatctagctatatatatatatagggggtactgtataggtaaggatcgatggcgaacttgcttgttgtactcgatgtagcacgtgaagcatcgcttggtctggttggccgacgggaacctccagtctcccggcgtcgtctccaccttgatctgcaaatactcatcagatcagcgagagatgcaagaatcgaataaggcctggtttagttccaattttttcttcaaaattccaattttttcatcacatcgaaactttcctacacacataaacttccgaccttttactttaagctttcgattttagtcaaacttctaattttagcgtggaactaaacacagtctaagagagggaaaaagtgcagacattggcatacttacagttggtttctcggccatgggaggggcgtcagacatggacgacgtacgacgatggtttcttcgtttactgtcctatacgagctgcaaattttacgatgagatatggttgggggtttggaatgttcatccgggcagtgtattataggtggtgacatctgcagcatgacgaaagtcctgggcaagttgggcgttctgggcgtttacttctgcgtaaaatactggttttgatgcttcctccagcgtgtccagtccacggctgcaatacaacgggcgctagctgttttgtgtgttaaggctggccggaattggaagaaggaaactggattttctaagcccaaggacgaagcccaataaggtttccggcccgttacgatgtgtcgcctcggcctcggctgaatcgggcctcgatgagagagcccatatatatacatgaacttatgcttttcaggccttgatgacggtaggcgcgccggcccattaggtgagagacgtcctagtctcgtggtacgtactacgtacgtgtattttagtcgtgtatgtatgtatgtactacgtgtaggcgtaggaggtgagggcaaaagtgtcgcgccgtgcgtgacggcgacggcaacgtacggctgctgctgttgccattcagtcgtcgtcgcgtacgtacgtacgtacgcgcgagatcgtcggagcggcgggtcaagacgtgacaccacgcgcgcgagaccgagaaacgaaacgcagccacgacgtgcggtgcgcggccgggaaagtcaattgcgcggcgcaggtacggatagataccttagctcaccacctctcgccagtcgccatcgctcggatttgcgtatgtaaatagtactccgtatatctcacttcagaaagttacgacgcttgagtctttgaccgatccaagctaagtaatgaatatctttcttcttaaaaaaaaaagaagataagaaaattgacgttccagaatcctgtgcaacggacacgaagacccactgcacttaaaaaatttatgtaaattacccaccactgctatcaaacccaacgcatccgtttcctttctatctccctagtcacgcgcgaatcattctccaaacccaaaccctgcgcgcaaatccttccccaagccccattgttggagggtgaactccgctagcgggggacagtgaggccccactttgttggtttggccggaggcagcgggtgagattcgagaactcagtgagatcggattcctcgagaacaatgagataataggggtttatacatgttcgggccgctaagaagcataatactctactcttgtgcttagctgattgtgtgagaaattacaatatctccttgttagagtagaagctgttgatgatgagggcagaagactgctttagtgaaaaaggctcatccctccctagataggcctgaaccgggggtggctaatgggcgggtgaccgctccaggcgatcacccccatcccttataagctactctctcccttcctcctcccatcttctcttcctactacaccatacattttttaaaaataaaaaaataaagttgaaaaaatttatgtatagaaatactatatataaaaatatttgaattcaaattcatatttgaaacgggtatgtaaacttttgaattataaactttgggcctataaactaatatttgaattcaaattcaaatttgaatcggatatgtaaacttttgacttataaactttgggtctataaactttaggtgtataaaatttagatgcatagaaatactatatataaaaaatatttgaattcaaattcaaattcaaatttgaattggatataattcaaattcaaatttgaatcgggtatgtaaacttttgacttataaactttgggtctataaactttaggtgtataaactttagatgtatagaaatacaatatataaaaaaatatttgaattcaaattcaaatttgaattagatatataaacttttgacttataaactttggatctctaaactttagatgtgtaaacttgagatgtataaactttaggtgcataaatttactaaaataagaaagtaatacggtgacaaaaaaagaaaccacgtggagggaggggggaccgcgctaggggcgatcgatcgtcccttagcctttccggcctggacctccttttatatctcaaggggttactacatgggcccacccagcctatccagggaggataatcacattaaatgcatgtctcgttgcttgccttggaagtctattgcacgcgttgctacggcgtggggcccatcaaatctatccagttgacacgggggacatgcatgccattcggtatttaatgagtgaagacttttgggtccccacttgcgccgggaaacagaaatcttacgctgaccgggttaggcaaaccgtctccggctgtgatacgcaatgtgacagtgcacaggcgtactaccctggccacatcggtcattcgactggtcccagattggtcacaatacaacaaggcgcaccacgcactgcatttaatgtagcatggtgcgctcgttcacactgccttaaatgcggttaggtgggcggaggaggccgatccccctggcggggtgcacgtggctaccgggggcagcctcctcccgatggtcctgatacctccagacccatatcaccgacacccatcctgtgccccgctccttcccctagccgcatcaccgccgccgtctcatcctcctcccactccgcaatagcttatggtattataaacattaattagctcaaacccaataatccagagaaataaacaactcataacttattcttattctactatagtttattataatccagcttataataacgtggatcaataatctgaattataacaatcttatgttgaaacaaataggaccttagttgtttatagttacataggttgcaaaaattttaacccgaaatcgtttatagttatgtacagattcaaaaattgcaaatactaatttgttaacaattttaattgaagtcatattagtattattattggctaacctataattagagggataacctcacagaaatttattactcgtgtcatcatgtcacgatgttactatcatcggagatggatggatatgcatatttttgttgcggtcgcgacggagattggagcgcgtggaaattaaagcctttcttgtcatttaacggcacagttgaaggtttcatttgcaagctacccatgttatagctgtcctgatcaattggcttctttttgtttggacgcccaacaaagtgaaaaggggcccgtgtgtccggtgtcgtacggcgagagcgagtttagattagtttgatcgagatgaaccaatcagatttggtaacagcacccaactgtaccaactgtagatgataaaatttaaatttttgaccaaaaaatacaaaatacttttcgtaaagactagccagaaacggctcattgttttggataagcatattagcaaaagtttgcagtaacttgaagcttacgcactcgatcaaaccaacttctagcgcactaatccatcgtatcgttggacctgtccttcctgaaaaaaaaaaaccgtagctctcatgtgtcacgcaggaatgatgaaaaagaaatcagaaccgaaccaaaaaaagaagaataagttcgatcggcctccatatccaccgagctatgatgaccaatgctcttctcctctttccccccacctacaactacaaatgttcctggttagtgccacgtcaccctctcactcatcggagtatatcactggcttaattaatcgccactcataaggaagcaatctccaaaaaagcatccattcacgcatgcacgcatcagagttcacaagtgatcctatcggcgtcccactgtttactccatgtgggcactcacgtcccaacgacagatcaagccagcttttgaccacccaaacacggggaaaagccccccgtgcttcacattacggtcgcttgacgcagtgttgattaggctggggacacccagttagctaggggagtattccctccatcctctatcctatagtataatactcctccctctctccttaaatatttaacgccgttggttttttaaatatgtttaaccgttcgtcttatttaaaaaaaattaagtaattattaatttttttctattatttaattcattgttaaatatactactactactcaattttttaaataatatttacaaaagtttttgaataagatgaacgatcaaacatgtgtaaaaaaaatcaatggcatcaaatatttagagacggagggagtgataatttagtataaaataaaaaaatatcatagtactatgaatctgtgcaaatctcatgttcacatttgtaatattagaatatgtctcattccctattaggttgttatataatcagagtagagtagtcagtgataaaggctgagacatgcatgcgctaggccacctcccataatacaacaatctagtacgtgttaaacttatcctagtacgatgaatcacttttgtaacaatatgatgcatctcatttcatatcatgttgttatattatgaaacagagagactagtcagtaagaaaggctgagacatgcatgcactaggccaccaccagcgactcagcaagagcacttgcagcagggttgggtaggaggcgtcacatgggcagtacgtatccgtgcacagccagtgcttggcattgcaggcttgggatgcaaacatttgccactttggcagcaatggtggcttggggggtgtggaaaggtcgtcaagaggacgcacatgagatgatccctctaggggttctggctggttctgtgttgattggattggggaattttgggacggatcctttgtttggaagtgaatccaaggcttctctccaacaacccaacattatatgtggtctcttcttttttctcgtgctgctggtagggaggctaggtagctcactactactgttacctgaatgaatgcaggaggcggcggccatcaaccgtgagctctctctcgatcggttgctgggctgcgcgtaggtagatgaggtcgtttacgacaacgcatcgtgggcgacttccaactgtacacgatcgtgggcgagacacaaatctagcaaacgatctagccggccggctggcgcatgtagtctttccataaaaaaaaaccgctaaatttttagtaggatatatcaatcttagggtggtgtttgcatcctttagtcgtaggacttaaaaaactttagtccatgtctgtttggatacagggattaaaaaaagactaaagattattaattgcactgtaaaaagaacatgttacctctaaaacaatgcagagagagagaggatagggttgtgagtgggggcagcaggtggaaagaaacaactcagtccctataagcttctcttatagggactaatggactaatgttctaaccatacatgccattagctattaagttagttttttataggatagaatgagtactcgccataaaatcctggaggctggagcaaacaaacgcaggggaaggtttcagtgataggcgattagcacacggagaagatcgtgcggtatgggtccaacaagaaaggcaactagcaaggtctgtctaacaatatgaattctaaattggatttcctcaacccccggccttcagatccattgccacgatggcactgactagcgtggagcactggagcatgactgcatgagcaacctctgtcggctctgtgtgagtttggaagttggaacaagaaaacgagaaaaaagatgtcatccgccgtggacaaaataacggggttgataaccctagaactttcacttcaacgtcattttggtccctgacgtggcttaatatagtcttcgggcttactagaaacgccaatggtcattccacatcatccattcatacaaatttagcatttaatatttgttctactattacatttttcataaaaaaaaggaaaaacaatgaagaacaaacaaacaaaacataacggcatatcttttggaaaagagagttttatcgataagtaactggattacaatcatgctgcccatatacataacacaagccatgatagtctcacaccaaactgcgttctgacttgattattttgcaagctgtgcaatatcatgagctaacctattacactctattttacagtgtgacagatcacacttcttaaacaaatgacattgtatcattcgttgcgcgcagcagaaaggtccaccttgatctttcttcctctctagccaataacctcccaaattaagcctaccaattgggcaagatccaccccatattcaatccaatccacaacagctagcaatgttatcccaaaccatcccaatccactagccatcccataaaatccaaaccagaccaatccattttcctcattagtctaaaccgaaccaacctattcttcttttatggcctcaatccacctcccaaaccatttaaacctacatcaaatccacttcgatccttcaatagtcatgccgtactcaccggcggcgacgcagctggatagagcaaatgttgcatgcatgtaactgtggcgtcgtggtgacggcagaggacatgacgccagcgccgttctcagctacggtcacgtcgacgtaggcgcaggagcatcgtgaggccagccagctcgctaaggccgtctcctcggcggtggcggcggtgagcgatgggccgacgacacaactgctcccttgtacatatcgcacacctgcagttagctatggtgaccatgcccagcggcaccatccccgccgtagtagatgttgtctaggctcagcacgggccatcaccagccacggcaaggaaatccaatcgccatgtgggagcagtggggcaacaacaagaagcctagtcggcacaagagcgggtagctctagcggcgagacgggaggagatcgaagagatgcaacgagacacgttccaactgcctcgactcccacgaatacggtgccgccatgcgcggcctctccgctgactgtcgccaccaagtccaggtcatgtgtgacctctcccgagacgaagaggacggcaacaaggagtagtcaaactcggtctgttaaaggaatccacttgccatccatgggttaaatccactttcaacccgatatcaccaaatcaaatccaggccacaccaatccacttatgtgtcaccaaaaccgatccaatccatttgaaatagcaacccattttcacccaatcaaagataatccaaactagaatccagtccatttaagccattccaactcaatccattagcaggcttacttccaattaccgtgccacagtcagactcaatactcgaccgatattggtacattttaggccttcacgacaagcaaataattcaacctcctctgctgccacacattttctgaaaaatctctaggacgttagaattactctcccgtcaatatttctaatcacaattcctattgctccatttccttcattagaggagaaagccccatccatattgattttgcccaaccatttggtgggggtcgccaagggtttgttattcttagtatagttgaatcaaaaggactccctgcctggcagatacttttgccctttgggtcttcagtttttggtcattggcgaaacagatgttgcattggtaattaaacaatgtgacatcttcctttgttttatgttcggtgtctcctttttcttctctcacccacttttttttcctactcaaaatataaagctaaacattgtgcaccatatatggctgtgttcagccgtctctcttctcaactcatttccctcatttttcacgcgcacgcttttcgaactactaaatggtgcgttttttttgtaaaaagtttctatacgaaagttgcttaaaaaaatcaaattaatccatttttttaaaaaaataacaaatacttaattaatcacctgctaatcgttgctccgttttccgtgcgggcacttagtgttgggaaccagggttccgaacacacccatagttgtaacaggtaaatatggagatttaaatgctgacttttatgtgcaaaataacttggtaataccacgtggcatttttaatggtgttcgagaactgttttaagccacacgagaatcttttaaagcttgttcagaatatgtgaaacatcaagaactaatttaacacgtaacaaaagtttaatgaccgaattagctattcaccgtaaaataatctgctcctgaagacctggaaataataagatgaatcacactgtccacgctattgccattgcatgaccacgttaaacaccgcttccagataaactaaaacacacaaatctgaccccccatgtgacacgatttctacgggcagaattattgtcccccccccccccccccaataaataaattccaaaaacaacttatccaaaaataaataaaatcccagtcaatggaagcttcctccattaaactcgtcgaattctccacacgcgtgaattcatttcaccaccattattaccgcacgacgcaatgccattcacagcagattaattcacacactcttcacgcggaaacacaaatcactacacaaaaccagccattcccaatcgatcaatatatgataaaataaatccatcaaaaatagcaacaaactactataaataaatactcccttccacacaacaaagagaggaaggaaagaaaaggaaggaaaggaaacggaaaccgatcaccctcccctcaaccaaccaaccacccacccaaccagccaggcggccggccgccaccgtcagcgagcagctgccgcggcggcgctcacgcgtctcctccccccctatttatatccggcctcgtcccatctccaccctttcctcaggcaggcgcacatctagcccctgcccccctcctttccccaccctaataataatatttttttccaatccccgaattccccccccaagaactccctcgatccaaaaggcaccgccgattttggtaatctagaaggttctagacgggcgaggaggatgcgggtgctggaggacgacatgttcccgtcgacgccggggaaggtgaagatcgagagggcgacggcgatgaaccgccagctccaccgctgcttcgcgtcgaccagcaccatgttcctctgggcgctcttcctcgtcgccatgaccgcgtcgtacctcagcttccagtccttcgtcgacacctcgtccaagtacttcgccgcctcctggggcgggctgcactgggagcgccagatccgcgcgtccgccgcgccgaggcggccgcccgggtcggcggcgggcgcggggatgtcggtgctcgtgacgggcgccgccgggttcgtcggcacgcactgctccctcgcgctccgcaagcgcggcgacggcgtcgtcggcatcgacaacttcaactcctactacgacccctcgctcaagaaggcgcgcaggtcgctgctcgcctcgcacggggtgttcgtcatcgagggcgacatcaacgacggccgcctcctcgccaagctcttcgacgtcgtgcccttcacgcacgtgctccacctcgcggcgcaggcgggcgtgcgctacgccatggagaacccggcgtcctacgtgcactccaacatcgccggcctcgtcaccctcctcgaggcatgcaaggacgccgacccgcagccggccatcgtctgggcctcctcctcctccgtctacggcctcaacgacaaggtgcccttcacggagagcgaccgcactgaccagccggcgtcgctgtacgccgccaccaagaaggccggcgaggagatcacccacacgtacaaccacatctacggcctctccatcaccggactccgcttcttcaccgtgtacgggccatgggggcggccggacatggcctacttctccttcacccgcaacatcctgcaggggaagcccatcacggtgtaccgcggcaagaaccgcgtcgacctcgcccgcgacttcacctacatcgacgacatcgtcaagggctgcctcggctcgctcgacacggccgggaagagcaccggcaccgggggcaagaagcgcgggccggcgccctacaggatcttcaacctcggcaacacctcgccggtgacggtgcccaacctggtgtccatcctggagaagcacctccgcgtgaaggccaagaagaacgtggtcgagatgcccggcaatggcgacgtgccattcacgcacgccaacatctccctcgcgaggcagcagctcggctacaagccgaccaccaacctcgacgtcgggctcaagaagttcgtcaagtggtacctctcctactacggctacaccaggggatccaagaacttgtgactataatccgccctaattcttctgctaattcttttctttttctttcttctttttttcttcttattctctggccatccagtggtcgattccactccaggatcaaaacattaacattcttatttcgactttttttttgggggaaatattttaggatgttctttggaatactggggggaattcttttcttgggggaggggagggaggaagaagaaagcaatggagagcagcatttttctcttccttttccctttatcttctccatgctcttctgtaaatttcgttctccataacgtttcacaccctcgaattttttgtgtgtaatctggctggtcatagctgagctatgaatctttcttgagctaaactaatcaaacaataaaacaacaatgcgtttaaatttcgaatcgattactagtttgtttcgccgcccgcaaaattttctcccggagacgagggagagaatgcgagaagaaataggaaggaggagaagcagtggcagtctcctgtaaatatgagccaaccgtgggcctttttctaatgtgataagataagcagagagagagagaaggggaaaagcgagtggcgcctcgaagggcgtgaggtggtcgccagctggcccgcgtcgctggcactgggcggtggggccgggttgctttatggcgtcaggtgggaccacctgtctgtggctgtggatggaggtggggcgggattgtcggggtggggcccacctaaacccacgttggaccacatgggtgggcccgtcaacgcggtcggtggcctctcgtcgttctgagctgtacccgaactgcctttctttattgcatagggaataagaatgtgttttgttcttgagatctaccctcatgagctgcgcttctaattatcaggatttgattaataaaaaaatatttgtattccaaactctgttaattgtaaatctggtagagcaaataaattgaagagaatccgttgatgattcatcgttttgaattaatatttgcaacccgagcatgagttgctctctgcacattgcagtagaaatgatgatcttgcactacgtcaggataggggaaaaacgagtaaaacggctactattccggtgtgaaatcgggatgtgcgaccagtggagcaaggtcccgtgaattttcggcaaacccgagcttcccgtggcattttgtatcgggttgcacgagtccaggatcaattggccggtggcatctccgattctgtgtcgcgccaacccaggcaaaggcaaacaagacgctgacacgcgtgtagtagagtcgaggcatctgcaacctgaaaaggcctgaaaccaaatgtgctgtgcctgcaccgtttcgggctctcgacccgtcgaccgggatactatagagtattcgacgtcggtttggactgtccgttgtcattgccctactacgtactggcgtactgccgatttatttgacgtacacaaggattaacataaacatatctacagtaattgcatccatcagaggcctcgtgcggtggtgagtcgtgacaagtttcatgatagcaataaaaatacaagtagaagttaattgtgattcatctgatcatctcccggacggcctcacctgttgacatggagcactttactttgggcagtggaggactagtgcgctcgctgttgctaatggccaggtcgggcccccacccatctaatgggagggaagcaacaaaacccgctgctctgctgcagcgcagcgtgcagagtgcaatggcgcgaggaataaaagaggacaacgacggaaaaagtgtactgctttgctaatctgaaacctattttaagcccaactgcatcctgtttttttttaccctatttgattcagcttatgattattataatctagattatcagaagtaagctgaaacaaacaactagattattatgctagattattataatctataagtcagattagtataatccaataatctcctatagaggagcttttttcagattattgagtggttaaagacctactacttttagatgcctctaataatccagagaaacaaacaacttgcagcttattttatgtcaacttattataatccagtttagagtaatctgatttaataatttagattacaataattttaagctaaaacaaatagggccttagccaaataacttgtttaggttgatcacttgatcttgttttgttgtatacgagtaatgtactggtctctgttggatttacacacttggctccaacttgaacctgtaaagggaaaataacctaaagccattggtcgttgctgtcaagttaaagtgacctgtaactgaagctaaggtttaggacgtgcaatgcaagactccgatgattgatgaagcatgggcctcttcatatccagcttgtgccacgagcccacgtccaggtgagtgttctcttcttcagataagatagtacagtactccatatgggtgttggggtcactgcatattcatagttcatatccagctcaaggtctcctgcctccaatgatccagtcagttggatcctgcttgtctggttgcttccttgaggatgtgggggatatcggaagcgtctgaagcaaagcaaagcatagcgtatcccgtgtggcgtttctgaactctgatgggggtttcagtcgcaatccaatccaatccaatccaaaggaaggcgacctcgccggttaccacttcggttggggttcgtttcgtttcgtcggagagaagtgttatacagcttcagagttaggaagccaatgtactccagtagagtagtagtgcatgtgtgaagtattgtcgtcctacatggacgagctgtgcaaaattgcactctgaactctgaaccagaaaaatacgtggagaactagagaacatgcaaacgtagcaggtggtgcggacatcgtcttgtttgaaatcagagaaggatttgagtcttctgaaggtaacagaacatgctgtccgtttttatgttgggtcaaaacgcataaaaaccgaaggtgcgagaaacaacaaaaaaattccgttgccgggactcgaacccgggtctctcgggtgagagccgagtatcctaaccagctagactacaacggatgcttgctctaatagatttcataattttattaaaagttaacattttgcaaggtattcctataactatgaggataattattggggcagtgtgagccttctctaatcccgccatctatgtcatcttcatatgattgctttcctgcatgatatgattaataatcgctgaaacaaaatacaaattgtacaagcaactctctcattttacaaaatcacaactccatcattttctttacggctgataagatataaaaaataaataaattgagtgaagcagctaaggataattgatgagaaacttttatatgttgttagcaatttaaaaagacaatcctgaaaaagtaaactacgaaacttcttaaaatcaactctaaaattaagttttaaaattcaaattttcgctaagaccgatggaccataagtaaccgatgtagtaccgttagtatttgtgtgctgaatacacataccaaacgaggccgattcgaaattacatgcaagcacctccgttccatgcatcagctaattttagaattcaaaatttcaaattcaatctgttctaatacgcaagaatgcccaatactgccacacacagtgatacaggcatctccgtccaaacctcacggccgttgatccgacgccgcgccgcgacgccacgtagcccccgtgccgcctcccttgggccttggcccaggtggcgcgctccctcgacacaaatctccggcctcccgcttcggccgccatgatccaacctcccccaatctctctctctctctctctctcgctcccctccgcaacgcgcgacctcacacgtccccctcttcccgctcttcctcctcctccccctcctcgcctccacttccacctcgaaatccctcctccaattccagcgccccgtccccgtacgcttcgtcgatcggcggtggatgcgggtgggggtggtggtggtagggaaggggcgatcgatcgagcatggccaaggcgtgggagaaggtggcgacggcggcggggttgggtgggtcgggggagaggcgcaagtacccgatccgcgtggaggactacgagctgtacgaggagatcgggcagggggtcagcgccatcgtgtaccgatcgctctgcaagcccctcgacgagatcgtcgccgtcaaggtgctcgacttcgagcgcacaaacagtgacctggtacgtttgcgcgtacatcatctccaattcgtttgttgggcccaatcctgcgtagagggagagagatccatcgtctcgcttaattaacctgtttgatttgcagattaattaaactattatcctccggtgcattttaatttttacaaatgtacttgtggatgatattgtccaacggtcggttggtccaatgagtcgcatactatcgtatcgaaaattttcatatattatttctgttgtcttacagttaattatagctcaaattttttttgctgactgcattcatgtcagattgttgcagtggttagttgtaatgcaagtaggttatactcggattgttgcgatttacgtaccgccgcttgatctgtctaaaatgatagtaacacggatatgcttgacgcagaacaacatcatgcgtgaagctcagacgatgattctcatagatcagcctaacgtcatgaaggcacattgttcatttacaaataaccactcgttgtgggtggtcatgccatacatggctggagggtcttgccttcacataatgaagtcagtctatccagatggttttgaagaagctgtcattgcaactgtacttcgtgaagtcctgaaaggtttggagtaccttcatcatcatgggcatatacatcgtgatgtgaaggtaaatgaacattttgcaccacagctggtttcttatgtatggctgttgagccatgcatggatatctcacacagatattctcgaattagttgtttatggagatgttatattgctgcattctttgtttcgatcataggcagggaatatacttgttgattcacggggtgtagtcaagcttggagattttggggtttctgcttgcctttttgattctggtgacaggcaacgggctaggaatactttcgtgggaactccttgctggtactcatctgaaaaaaagtagcaaatatgctttcatttatgcaccattaacgtgtcttcacacatctaatctgtggactactgtaatttattaggatggcaccagaggttatggagcagctacatggatacgatttcaagtaggctactacttattttaactgtctggatactttcttcaccatggcatgtttacaagcttgatcttacaaatatattacagggcagacatatggtccttcggaattactgcacttgaacttgcccatggtcatgctcctttctcgaagttccctcccatgaaggtataatcaaacgcatgacattgagataaattcgagacaatcccttatgatgggtttggtggacttttctgaagttatatagttcatacactttgtcaggtcttacttatgacacttcagaatgcccctccgggccttgactatgagagagataagaaattttcaagggtaaatatgtttaatatttgaacagacctaccattgtagtttttatgatgagcatgacttcttatttgtcaacaacgattatctcctatatcagcatttcaagcaaatggttgctatgtgtctggtaaaagacccttcaaaaaggcctacagcgaaaaaattgctgaagcaaccctttttcaagcaagctcgctccagtgatttcattagtcgaaagcttttggagggattgcctggccttggtgccagatatttagctctgaaggtacactggtttagggctctataactagttttttgggggcaaatgatcgtcttcactaagttaacagtggagcttactattaattataggaaaaggatgaagttttactttctcaaaagaaaatgcctgatggacagaaggaagaaatctcacaggtgccaattctacatttctgttagatcatctagaaaaaaaaatctgatttatacctttcctaactatggttctattattatagtaaattgataaaatattttctcttgcactgagcctgttcagtacgcctttgtataattgtatatatgtgatggtgtcattaaataatcaagcatttctaagcaggtgtgcaggtcaaatgatacacttgtttctcattagtttctttattcgaggatcaatgaagttattgttgtgtactattatatttttgccaaaaaaaaaagtaaatcaaaggattcccaaaacatattgtgcaaaacataataatggtgatcataacctcgggtgagtagtccatattagaaaatttccttcgatttgtacggaaattgcaatatctgttttgcagcattaaaaacttacacattcttagtgtaataactataacatattattaggcatttattacctgaatttaggattctaggtcatttcttttttcctgtcttggtatttatatgtttatttcattgtcgacattgtattacaagcaaataattgctcctcttgtttcttatattgataggatgaatacaaaagaggcatcagtagctggaactttgatatggatgacctgaagtctcaagcttcacttgtaagaactagttctgttctcttctttagtcattgattcacatcatgtaatttctctatctgtctgttcgcagattacagagtgtgatgacagtatatcgtgcaaagattcagatgcatcatgtttctatgacttggacaccattttaccagagcgagcaacaggacctcatatgtcaagagttttttcaattaagtatgatacggacaccgtaagtataattttttgtataaagttttgtgttctaacctagtataaagttttgcttccatctaataccgagcaaagttggtaggaaaatgatgtgatgagcaatgataagtcagcagtttcatctcctgagcaccccatttgtttagcaaggtatttaatttattcagatttttatagttgcttgcaaataagagggtcttatttctgttcgagcactagagtagtggcagtgccagattatataggctatttctgcagtgtacttgtactattctcttctgaaaactgtcatttactaatttaaattgccaggaatacatcaatgctcaggactacaaacggggtacatgcaaatggccaggtcaggaaacacagctccacagaaagtagtgaactggacttgcaagagaaagattcagatgctattccaaccagttcattcagctcatttcatgaaaggaagttttctttcagttcttgctcatctgatggatttctttcatccaaagagaggtttgttcaactttaaagactgacgagtgcatgctaatttgaagaatcacattttcccaagtagcagcacaacctaaaaattagaaacattgaactgacttgtttgagaatgattcaaatcttgttttaggacctgttttagtttatccatgaatatgacgaatccctttttacttgagaagctattgttatatggtgctggtaacatgacgctattgtgctatttttaaacagtctgtaacagcatgcctcttattcgttcagctcgaagcatcaaattaacattcataaccgtgacaagtgcaacggaggacccttgcaagttgcagatgaaccatcccctgaagctgttccaaaggtgcctaaatcatcaggtagtgaaatgcatttaaccctgaaatctgtttattttttcttcaccgtagtgacaattcagtcacgtttgagcatcagctaactcagtggtaactcatcagaacaagttccttacggctacataaaaccttgtatttgcctatcggtttaacgtgcttcgttttaatacagcagcaaatgttgaggaccacgacgatagatcgaaacctcctcttatacagcaaagaggccgttttaaagttacgcctgggcatgttgagttggataaggtaatttccagccataaatacttactgcatgttctgttaactctgggatgacatgatttttcgtttcaggctcactcacctggactacagaagagtcacagcatgcaggttattagctttatctctaggattttcaatatcgttcgattcaagaattgatgccatctgttgggagcaatatacaggtcattttttattgtgggtttttcccccactaacatacgtgccactttgttttcacgtaggcaatttcgcaccttccttcgttaagtataccatcctcaattgaggctgcatcaaccattattggtgggtccctttatatgcagctgtacaatgttctacagacaaatatgcttcagagggtaaatctctcaacccacacaaactcacaagtcacaaaaaaaaagctagaatacgttcagctctgttgatggtagtcttggcctcacttgcaggagcaaatacttcatgcgatgaaacagttaagtggttgcgatatggcaatgacgtcacctgcctgcattgctcctgcaagtcgcgcatcatctccatcatcagcattatcaattgacagatcattggtgagttaaccacactaggatgaatctcaaagttaactctgcgagattatagagaaccaaatactagtaatttctatataataattcctaatatgtagtgccatcatatcagagtggggaaaataatttaagacattgcaggactgctatttataattgtcagttgttatagtaattggttataagagcaaagacattactaccttttcagttggaagcggcacacgaaaaggagaaggagctggtcaatgagatcactgagctgcaatggcggtaatgatcttttaccccatccttttagaccgaattgataaagaaattaaatagcttcagtcctgaaattttggagcactgcaggttagtgtgttcgcaggacgagatacagaggctcaaagcaaaggcagcccaggtgaccatgtttgccctcattaacatttttcatatggtttggcgacattctaaaaagtgtatattggtgcagtagaaattggacacgatgctcagaaatccctaatttgttctgatgcaaatttctgcatacttaatgcaaacatacttctttttggtcagatctgatcttgtggagatgctgttagatatggaacagcacgggaaggattgagaaggtatgtgttaacaataaggtttttggaggagttgaaatggagacttttggcatatcagacaagaaaaacaatggagagataatattgtagggactgcagtcagtcattatcctagtctaaaaaggatgtattgttttatgcaagttatatcttgctgtttatgatcatcagagcgccggtttttatcgaggtgccgttatgcaagggaaaacaaattggaatgttcgctatcattagcaaaatccttgcacttatgtatttttcttttggtttcatgatgcttagagcagtagaacaatacccagtgtggagtaatctgcgcggacttctgtcagtatggcagtatgctggttcatttcattgtaaccactcagggcaaagtctgtcagtcgtgtagcaaagcagttacatatacttgtagtgtaattatattgccatattggcagttactatctataatttacatccacaagaaggatgaatcatccctcaccattggtgggcacatctatgatacacttgtccaattggagttagaatctcagcccaaaccacagaccagccctaccagcacactatcttacaaattgtatgtacacacagctgaagcttctgtcattggtgagccaactagtctgctagtcagtccttgtgttgttcctcccgctggggagtgctacaaccggtatccagtagattgagctcgcgttgcaaaacccaggaagattcatttgactttgtggtgttgatcgagtactcgcggaagtatccatcatgagttatgatatagacaacagtcctgcaagtttttgcaaagacaataatgggtaagattttactaacccacagtagctatatgctaaataaagatgaggggcagaaaaaaggcgttttcatttcttaccttaaagcaggaagtttagaagaattttgtgaattttcgaccttatgtacggctacacagctgaaattccaaaggattagattagaatgacaataatggaaggtagaaagtagtggaaatcagatgaactcaacacctcttgattcctgcagggatgacgttgtgaataatgtgatggtttgctggatccaaagcacgagttattgctccaggaatcattgaaccaagcaatttgctcgtttggttcctgaaaagtggagtaaatcagatcatgcctacatacaccgtccacgaattatcaatatttgagctggctatgtaccttcgatttctggcagcatcgaggaaaaacatgtgcaacgagcctgatgaacttgtggcaacaagaacatcgggcagatcatccgatggtccgaatgagagtgaatatattgttgatgggtatgttccccgccgaaaactgtgtgactgttgaagtatgtatgtaaaaagagtttaggaaaatctagttggttgcaagagcagacaataaataacgttgaattcaccttggttgcttgtgcaacgagaaatactctaataatagtacccttcccagaagctgttgccaggtacgtgccattagaagaaaatgccattgcagctaagggagactcgtgagcatctatctgttggtcaattacacaaaaacagtgaaaagacataacataagtaaagaaagaacaaaacaagctatcaaagctaataattaataatacaaagtgaaagaaagcagttcggaaaatggtttattttgttattttcagcttattataccaacataaatatcttacacggctaattttgcataactgttcttttttcttccctctgatttgaaaaggcagtaagagatcctaaattatcaatgaaatgcaatggcatgtaaatcaataatttcaagaaagatccaggaccagaagaacattaatgcgtggggatgtgtgagaaaatctcatggaaggataatagcctacaacagccaataagattaaccaataaacaacaaattcaaattacctggcatattaattcaggttctgatgccttataaactaaagcagatcctttggatgtgcttgctgggatggccaaataacatgcttctgaattaggagcgaatgcacaaagacctgatatacaaagaataacaatattaacagcaaatatggtgagagagcttctcaagaatgcttaatgatctttttctctagctccttcaacttgatgccaggaacaaacagcagtaggatcctcaccttttgtattgggaactgtttcaatttcttccaatatagtagtgctgtttacatcataaataaaggtcctgtcctgcaatacaacaacaagcctgcacatgatgtgacaactattttacagaaaaaaaaacgagcaagtataatatgggattcatcattatatattgcatgatttttgcacaaatatgttaaccaagaaatatctttatatcataaaaaaactaacatgtttctaatgtagtcccttctaggatataaaatactggtgacatacctcgttctacttaatcgaacagccaaaactgaagtcttaaagttcagatctttctttgtgacagctgctacggtgtcgataaggcgaaggcagcgaggagatagtacaggctgcagagataaatttgaacggtagttaactagcaaattcgtctatattaaattcaatagtatgacagacaatcacacagcaggaacgactcaagcaaacagggaaaatatggccgaggtacctgttcaccagttccgactatagcaagaatgtttgtccgaaagtacatttccatattgccgattccaccaatatctgcaaattgagcagatagctataacaccatagcttcttataaaagcactacagaacaactctctcctccatgatagaatagccagtttccatgctaacggcaataaaattcatttggttctaccatacatcaatgcacactaatgactattaacctagctgactaacgcaggcagcacaatgtaaccttattcagcttaacatcctactgggaattaactgtttctacttcacaatctacgagcaatctgtgccaaattttacatgctgtactgttggatattcgcgctaggcaatggagagcaacaagaacagagggatgggtaaagaaaaggaagatgcattgaaggaagtctcactcttctggtagtggagcttccctgtatgggcatcgaaaatcctgaatccatccttcgtcccgacataaaacaagctgaaacaaatcaaccggcacgcaatcacaattagggttcttcgtcgccggatccgacccaagaaatcccttcccacccccaaaattcagaatcgccgactccccccgaatccagttacttgtcgttcgctcggtcgtacctgttgtcctgattgaaggaggcgcaacgaatctgcggcggcggcggcggcgacgagctgctcgccatcgcccgcgaagcgacttcttcctcttcttcttgatctcgtggaattgattcctgcttggagttttttctttctttttttttactataatttatttttatattcggaacagtcaaaagcagaaaagaagtcgacctgggctatctacttgcagcccatgcagacaggacggcccagtatgacccaagaattcacaaacttgcaacaaaagagaataagttcatgttgggtcccttaatttgtcgcccagtaatattcgcccttaactgaaaaaccagataacatgtcccccagtttataaaaccggtgcaaacaaggtccctcggcagtattgtctccagttttagctgatgtggcacctacgtagctcatttgactagtttttgtcccacgtggtgttgacttgatgcttacgttgtaatttgaagtggaaaataataaaaactatgggcccacatgctagttataaaaaggaataagttcactttaggtccctctatttgtcggtcagtttgattttcgtcccttgaccgcaaaaccgggtatgactcgtcccccaacttacgaaaaccgggcaaacaatgtccctcggcagtatggagggcggttttggccgacgtggcgcctacgtggctcctttgactaggtcttcgacccacgtggcactgacgtggcgattacgtggcattgacgtggcgctttcgtgacaattttatccgaaaaaatagtaaaaatcatgggacccatatgtcagctaaaaaaaataattaaaaaaggtgtggcctatttggtcccacctgtcagccttcctcctctctctcccctctatactacaagaaggcgagcggcggcagcacagagggggtgacgggtggtgggctgttgacggagcgacggcgggcggtgggcggagcggtggcgggtggcgcgtggagcagaggagcgctgcacagcaggcggagcagaggggcggcgggagcggcggcgagcggtgggcggagcggtggcgggtggcgggcggagcagagggacggcagacggcgggcggagtggtggcaggcgtgctcaccggccgaggtcgccgcctcactcgctcgttcgttctcgacatgaagtcgagggggatcgacgttgaggcagcggaagaggggcggagcaagcgtccgctgttagtggtcggcgaggacgggcggagtggtggcaggcgtgctcaccggccaaggtcgccgcctcgctcgctcgttcgttctcgacatgaactcgagagggatcgacgtcgaggcagcggaagaggggcggagcaagcgtccgctgttagtggtcggcgaggacgggcgggtaggatggcgagctcgagctcgccggctcccctcccctctccctctccactctcagatcttcctcttcttctcggctctccttcatcctcacggcggagcagcgacctcgccaaggacgcttcatgcacctccaacgcgagaggagtggcggtgcgcgccggccggcgggagggagggagaggagcggcgatgcgtttgggtcggcgaccggcgggagggcgagagaggaactacggtgcgcggttgccggcgggagagggtcggcggcgcaagccggccgactggtgggagggagagaagcggcggcacgcgccgcgccagtggagagggcggaagagagggccgccgagcgccgcctccctcctcgcccgaccgccgcaagcggcccctcctctcgcctggccgccgcgcaccgtctccctcctcgcccagctgccgagcgccgcctccctcctcgcccggccgccgcatgccatgcgccgctcagcccaccgccccccctctgtgccgccgcaagctgcccctcctcacccggccgctccgcccaccgcccccctctgcgccgccgctcgccattctgtaagggagggagagggggatagagataagagggggctgatatgtgggaccacatgggccccaccttttcttataatttttgtgtagctgacatgtgggtctcatgttttttttattatttttccgggattcatttgccacgtcaatgccacgttggacgaggacctagtcaaagggagccacgtaggcgccacgtcatccaaaaccgggcacaatactgccgagggacctttttttgcacggttttgtaagttgggagacccatcatacccggttttgcgaccgaggaacgaaagtcggactgggcgacaaatagagggacctaatgtgaacttattccttataaaaaggtaaattaaaagtagcacggcccacgtgtcatttcactcccctcctcttatctcctcctctccctccggtcccttcctcgtcggaggtcaaacggcggaggggatggatgacattgccggagccggagaagagccagcggatggacgacgagggctggactgaggaggaggaggatgaggtccaggttaacgccctcggcggctatcgctgctattgcggccttctccggcgacatgaagtcgaagcccacgcaatccgtcgttagtgggcactccagtctgaatgaccccagttcggcggacggcggctcggcacggtgcttgcgcttgttccggttggctggctggctggttaccttctcaagttctcatgcactgccgctgaccccaacagtgacggcgcgcggctgcagcgtcgcgagagtatgcttgcttttctttttcttttttttttttgacgtgggtagtgtttagttcctccaaacttctgaaaattccatcacatcaaatgtttggacacatgtataaatacttcctccgtttaatgagtatagacatactcattaacatatatatgaatgtgagcaatcctagaaagtcttataacctgaaacggagggagtattaaatgtggacgaaaaaaaccaattgcacaatttgcatgtaaattgcgtgacgaatcttttgagcataattacgccatgatttgacaatgtgatgctatagaaaacatttgctaatgatggattaattaggcttaataaatttgtctcgcagtttacaggtggaatctgtaatttgttttgtcattagtctacgtttaatacttcaaatgtgcgtccgtatacttataaaaattttggcacacaaactaaacacggccgtacacacttattacagaacttaaacacacaccccagcactaagcatatactccctccgtttcaggtttataagacgttttgattttcgtcaaagtcaaactattttaaatttaactaagtttatggacaaatattgtaatatttataatactaaattagtttcatcaaatcaataattgaatatattttcataataaatttatctttgataaaaaatattattatttttttataaacttggttaaacttaaagtagtttgactgaagtcaaaccgtcttgtaacctaaaacggagggaatatatataactcctttttttccccttttctgttcagcacactgtaaaatatacacacgcgtcgatgaagaaatcacgttagcaggcagggcggcagttctatcaggcaggcggcaacggcgcggcgtcggcggcggtgtcgtcgacagggtgcaccctccgggctttcctcactgctgctaaccaccgtgtggtggtcctccagcacagcagctgctgagcagcagatgaagctgatttttttaaaatgataaaaatgtattatatctccagcttctgcttgtgggcacatagacaaaaagtccaaaagtaaacataaaaaaacttaaaaaagacgagatggaacaaatccctaacttttgctagcagatgaagccgatggcgctgaagatgatgaagagagcgacgacgagtgtgtgttaatatcaatggtgaaagaagtgaattcttccggacttacagagggcttagacagggtgacccctctctcccctgctgtttaatttagtaagtgatgcccttgcgaagatctttaaggatgcaaaagctgctaaccttctgtttgggctcattccccatctcatccctgaaggcctaacacacctgcaatatgcatacgacactgtgatctttattcctttcattgacagagagattgtgataacaaagttcctcctttattgttttgaagagctttctgggatgaaaataaattatcagagagagtgttgcaaatatgcttaactgtcccctaggagagtttcctatgatgtaccttggacttcctattagcccaaacaagttgctgaatgcagacctagacttcttaccacagaagttggtcaagaaactcggtttttggaaaacatgttccttgtactatagtggtagagctgttcttatcaactcttgtctctcttctatccctacttatgcaatgggcttatatttactgcctgaagggattcaccagaaaatggactcaattagaggcaaattctattgggcaggcctaagttctaaaagaaagtatcacatgataagatggaggaatttagctttccctaaagagtttggtggcctgggtttcactgaaactagagctttcaatatagccctcctggccaaatggatctttaaacttgaatcaaaagaaaagagtttgtgtcttgatcttttaagaaacaagtatatgagagatagaggctttttctatggttcagaggtagggatctcccaattctggagaggattactaaatatcataaagtggtttgttcttgggggagaatgggctctaggaaaaggggaccatatcttgttctgggatgacgtttggataggtaattgccccccgagaattaggttcctggggctctatgaaatttgcaaccaacaaagaataattgtgaaagaggtggctcaagaggggttagaatgccttactttcagaagactttttggtaatgtagagctgactgagtggagttatctgaactaacacaagagattgcttgcaccgacgaggctgatgtgctcaaatgggttcatggaaagaatggagtctatacctcgaaatcgttatatcagttgttaaattttagaggtatacttgaccccaaaatgaatatgctgtggagactaccgattcctcttaagcaaaaacactttctctagctagcaatgaaagatcggatccaaaccactgaacaattgtgacaaaaaaactgggaaggtttagaggcttgtgagctttgtggtgtcactgaaaatgctcaacatgtcatttttacttgtcccatggcatcttttatatggtgttttgctagagatgggtttagctggaactttgttccttcatcctttgatcacttttttgcatcaatgttgaaacctaatgacaattctcataatactctgagttggatgtttttggcagctgtgagctggcaactctggctaactaggaatgacatgatttttcgtgataaattgattgggtcgccgctcacgataatctatcgtgtgatttcccttttgcagcactagaagatactagtgagagcaaagggcgccctaggcttggagttttgtgacctcgtcactgcttgaggaaacaagaaggttccacccgcaggcaggaataggctgagctcctttaagttttcagttgttagtcctctggagttctgctttagctcccgaactttgagatcgctggatgtttgggttctcttcttcgagttttttgctttctctttggcctgcgtgcctgttatcatgttcccatgttcccagagcgaacttgtaaagctggtctccccagcaaaacaatctattcctttctataaaagcagggcgttgttgacgaaaaaatcgaacacaccggcctgagagatctgcttagctcctgtgcaagtccaaatattggtgagatgcgagtgtgccagtcagtttgatcctgcaactgacaagatatgtaaacagcagacaaaacagccgatcggctagacagccgatggagcaatgtcagccgatagccgataatagccgatgccgataccagccgatagcgatatggtttaagcaatcggctatatgtctaatgtagataatgatataaaggcaatcggctgatgatgatataataaaataacaatatagtcctgtataaactaattggctagcaataatatgataaataagcatcgatccgaaggttaaagcacacatcggctggaggtctgatgtcatgaaatccacaagatcagattaaacagtgaaacctttgttgtcatcggctaaatacaacttatatgtatatgcaatccttatgagccgatgcaacgtccagataactcaccggctgaaaccccgatgaaacccttattggcaatcaagaagtaggctagagattatggttctaagcacgacttagtagatcaaacttaactgatgcagcactaaatatgaaaagagacataatatctagacaattaagcctttgactgagttttcaggtgtggtagatatctaagctaatctaatctagcaacgtgatttagccaataccggcagaaaccctaaaacgagaagcaaccgatagagctaaattgatatgctaagactagattaatagatacatatgataaataggtagcaaatatatcatccaaaccagagcaatccaagaggtcgaatgtactgatgcagccttgaacgacgccgatgtagatgagacaattgcctgggccgacggaacattggacttatcccttcgccggagatcgaagacgatgcagccccacgtcgggtgccaagttccgccggcacgtaaaaaaaaagtagaagtaaaaagggtgggcgatgcgctgaattgtattgatcgtgaagattcattacatagaccccgggtgtacatatttatacccaggggttgatacaagtccttgtcggacaagaaagaaactaacctaaagataaaaggaaaatataaagtgcttatcggacactaaacacattttcctaaagataaaaggaaactaacaaactattcctaattaatagataaactgccatgccgcatcctctttaaactcggtcacttagggataagcttcctttagtacattgatttccttaaccaaatatagcaggaatccgactattggcgacttgataactcccatcggctgattccgagatgctgcagccaataatgattctaagccgatgacgtctttgccgattaccaaatttcattgttaacaggcgtcaagcctttgatctaaaaaaaaggcacggcgattgggattgcctatacatccgtttacttctgcagtaacatgcaattttacgggcaccaacacatacataatttgttcaagaaaaatacatacacaatcatacttattgcagtaacatgcagtacatttttttatcgcaatacaacactatataacacataggacgaggcacactatgacaacaacacactatatatactgtaacatgcttctttaggcagtcggcacgacggcggcagcggcggtggcggcgtcgatggggtgtaccgtgcgagccctcctccctgcggcccaccaccgggcggcggccttccagccggtgcagcaaacaagggtcactgcagcgagcagtacggagatgaccacaatcaaacctgcaaaatgcattatttagtaatcccggaagaatcgcttatatacaaacctgccgagatttgcggctcctggagatttttgagctggcgtggccacctgcgcgtgccgacgcgtcagcgaggcgctggatggcgggtggttttcgtgagctcccgcacgtccgtgtcgtcgttggtgattttgcaaaaacacccttcatttacttgataatttgttatagatccctggtccttagttctaatgttgtgcgcttttacttagaggacctcttaagaaaacaatattctatatgaagaagcgaaaaaacggaaaattgaaccgcgctctgaaaactagaagtttaggggttgtttttgcaaccctcacccctttccccaaaccctagtatatatatgtgtgagaagaactaggacttgaacctatgacctcctagttgaagaaaacatattttctcgtggctaatgatttagtacagatgatcttcttaatgaatgaaatgtacttttcatgttaaaaaaaactagtcattatgcccgtgcgttgcaatggaaagatatatttcccgaatacctaatttttaattaaaattttttgtgttaattgttttatcatctatgaacaaaccgaacaaattatagtgatttaattactttaatttgaaatctaaagtagtgaaaaaaactaaagtttttcgccaccagattgcgccacgtcatcagaaaaacataggccgtccgattgcccctacagatgatgtgagctgttggattcattgattggcaaaatctttcgcaataagatccttccacctccctagtattaccatttttcattttcacccctgctacctggatctgttgcgacaccgtctcgggaggccgcctccccttccctggtcgctacgccgcccccactcccgggaccgggaggcggaggtgctagattgtgtgctagtcccatctccaaagccgctatgtctcctcccaatctccaccacatcaatggggaccggagaggtaagaagaagagcctgcagtgggaagcaaaggaatccatacctcccctttctccgcttccacctccccctgccctagccacaccccatcctattcctcctcattcccatccccaacactactgcggcatcacctcctcctacctgttctggatccggcgatggtggggctgattcggattcgggaggtatggctcgacctgacggcgatgcacgcggaatttcacttgccgccttatcttctgcatctccatctgagtgcctctggttccccaggacctactctgcagcgccacttctccaatgacgatggccaagggaaatacaaaaagtcccaacatcgacagctgtggtaagtatctaaactccttgctccttacggtgttcgtcttggtaaagcatgtacgatgtacaggaaccacggcttcacctagtgctaagaagttgatttagactaaaaaggtgatcaataagttctataatggagtccttaattaagcctctcatgtaatttcagtttttgggtgggcaaatttcatttaagagcactgtaaaaagaatgcatcctatcaaaatgtaacttcaggttcattaattataaatagttacatacaattatttcaatagttatcaaagatatgtgtgataacaaatgaatttataagtggattgaaatagtattttcctccggatgcccaacgtccaactcactgaatcaattcgatggcagtggttcaccgggatataactaatactaataatttcccgaaaaaaagtaaggagtagtactagctattcatgcatttagaaaaaaaaaaggttgctcctaacattatataaatgactggtgtattgctatatttgtgtatctatatatgtttgtctaacgagcaaagctgcagcaagcaggggagtggaaacctataaaagataattctacaatgtgtttgcttaagcttaaatgaaatttgactattaaagatcaaatgtatttgactctaagtacacatttagcttccggtttgctgtgaagggtgtattcactgattaagaatgaattttgataatttatgaagcaaataataaagcaatcaaatattgtattatcaggtatttctttttcttgatgttatgagttttaaagcaatgactgtaatattgatttgcgttattggtctttgcctgaagtgacaattatgaaataaacgtcctgtcaaaatttgtggtttcattttttattcaacttgctaccatgcatctaaggtatgaatcatgaacattagtacttcttgaatggtaaaaactggatacgagttgttgaggaataatattgtttgatagaacaagaaatttattgttgttgactgtgtcattaaatcaagtcctttttattttcttcacacaaattctattaagaaagcatttcaattgtgcctccaaagataattttcaaaatttctagaaaccacccaaacttttgtgcatatacccatttaatcaaattggaatgttgtatatacccatttaaccaaattggaatgtatctactcaaccttttgtttttaagctatgattccactggtttagcagatgacatctgaacatatgtccccaaataaatggtattgtgatcatctttttcacaggttagatactaaccatttcatactgagtgttttggcttcacttccccccaaatatatactttgaatcctatgatagaaacaccctcaaatgatggtacagacgcaacaggtgcaattatctccccaaaggtaaaaccgtaaaagtatctcctctgttaaaatttgagagttttggaacttgcagatcttatcaacaaggaagctggcaccatccaaaccaggtaatatttttcttggtactaaaatgtacaaataatctcggaacttcagagacgctgattctaactttctgagatgtgttcaaccatgtggattgcttatcaacttcaaacttataatgcttagtgcagtatcatactatgtaacaacctggaagtgaaattctacctacatttaggttgtgtcctgtgcaagcatgataataataataataattattagtcaactttagaaagcacctactttaaatttaatattttgttcgcccaatggtctaatggtgccattataagtttcatgataaactaatggttgatttcacgtagattcagaatttaactactccctttgtttcagtttataagactttttaacattgcccacattcatatatatgttaatgaatctagacatatatatctagattcattaacatatatatgaatgtgggcaatgctagaaagtcttataatatgaaacggaggaagtaattgtttgtccagtccttttcaaagtcataaattaaattattgtgtattttatgagaaaatattgtggaataagcatgtactagccactggatgagatgactgaactttggaaaccaaaagatcttctacatggtacttgaaccttacttgcaaatataggttagttctaactaactatttaccaagtcctatgtttttttaagaaaaataaattaagagttaatcccattatcatattatggtctatgtatacagggcttatatgtatactgggctaagtcttttgcccagccagctcgcctatggaaacggcgaaaggaaccagaaggtttgctcctatgttgcagttgtgattaatgccaagccctctgcacctgccatgttccaggttgtgatttcatagaaaccagaaggtttcccattaattttgagatgcatggatcatattgtactcttatccggttatgagatgcagatctaacaatagcgctgtggcaagcatggaacaagatggagcctgaagcaaaattctcaaaacaccatttgaagtcaatttcagggccatctttttatgcgaacttggagcaagcttctaaagatgcgagacatgaaaatacaagaaaagttggataccctgattgagggaaaggacaatttcatgatatttctatatgtctaataaaaacatagttcatcatatgatatattacgacccataaatatagagcttttctacaggtatctaaagtcgtgcaatgcacgaccaaatggctagtttgtcttgaaattcacataggttttcaaatgttcatatatttaaactgttggctatttcaatttttaagctaattaatattttggcctttggttagaaacatctaggccgaagaagacttgtaatcctagtaagcctatttgtctcagttataggttgtacaatattttttgattaattattttattcagaaattatagtgattgagttattttaatttgaaatttgtcttaaaattcacatattatatcaaatgttcatatattttaattttcttctatttcaatttttaggccaatatttgggccttctgtttggaacatataggctgatgaagaacattaacaaaataataagcaaaattaaaaatgtattttcttccaatcaggacatacatccacagatccactgccaaagctagttgtatcatcgtaaattcgtaatttgcatcagcggcttcgcgccaccgccacgcagctcggcgacgcggcattgttcgatcggccggagcccaaaggttggcgttatctggtgacgcataaaaaacggatgtaggcaagttggcaatcgaatagtagcattgtagaaagcgattagatcagtgggtaacatgatcggaaagggaaacgtcaagtgtggtttgtggtacgattataaaacggaaaagaacaatacgatacgtgagagccggattggacgcagaccaaacaatgatggaagatgtgcataatccagctcaatttcagacgcgtgctcgagagaagattaacgaacgcgtgacgaatttggtgtaatcgtggtgcaagactgacttgatcggcgggagtagccaccggggacggaaggaaaatccatccaaggcagacatcgattccgatttgggggcatcacacgtgcgcgaggcagcgggagagaacagacgatgacggacaaatataaggtgaaaagatacaatccgtattctttaagtatatgtaaagaaaagatataggtaaagataaaattaaaaaacaaactctaatactagaatcttgacaaaaacatatttaatttttatatataatagtagggatagggatatagtagagatagagatacaaggcgaagaagaaaagatacggacctgccacctgggctccccgccggtctcggacgcttcggctgtcgtgcatcgcctccagcgctatgtgcccgtcgccgccgtcgcctggcattgtcacacacagaagtacagaacgaatcctgtgaggctgcaacctgcaagcacctacagtacaaaaaaatcactaaccttcgaggaaccaaatgacaatttaaagaaggaagaatgctctctcataggctctgactcagactcatccatctacttgaaaacatatgcggaaagacattagctgaacacattaattaacatgtagagacaaaatggaattgagaaggtgagttattcacacaaggtcgaagcaccaatagcagtatgcaagaataacaaagatagcagcgggcggcggctctctctaccctcaagattacggctctacctattaatattactagagcctgtggcgcgcctttgcgcgccaattgcatatagctggtgtggtgtaaaagttgattccattattagaaagcggtggaagcataatattaaccgtcgctgataatgtgcgccgctagtagacagttaggtagaaggagctgaaaattaggaaaggcaaatagacacataccgaacaaaatataagaaaacatgtaatcgccatgttaactacatataggcagattggtagttcgtggtctctagcagcaggtacatacatagatggtatcttatattgacaagggagtgcagtatgcatgataagcacttcaggtgcaaaaactaattagcatagtaacagtggcagagtaggtacgtgtttcgtctccatagaaataaatcttacagtttcctgctagcattggcgcgcctcctggggatataggttgctgaatgttgttactcctaaatatgaacatcatatagcttgtccgttaggagtcctcgcttgaagtagtgggccttggtgtctacatggcaagtttgacagcaaaatttgccagccacggtagcaatctaaattcatgtgtagtcaaatatgcatgataatttttacatcattcttctacctgtaggagaaccattcaaatattgacaaccatttacggtactactaatataattaaagaggaacaacgccaccatttcaaacacaggtttgttcataaacagatgaataataatattcgcgggctataaatggatcgataacatcatctgtatggtatatataactttggcattacagcttgatgccttcaagtaagatgctaccagttgagtaattacatttaaaaagtattgttaattcatgctttaaaaaagcaacttaataaatttacgaatgggtataagtagatgaaaatgttgttggatcttatggttttccttttttttctacttttatccttttgaccataaggtgaaagcagaaagcttgttcatggtgaagaaagaaaaacagaacaaaatcacaatggaaagtatgtacattgacttaaaaagcacagagaaaaaaaataaaacatcaaatcacaaaagtgacacctttttttattgacaataagattatcaggtgtaccatgtgtgcagtgtgcctgaagatgtagcaccagaaccagaaacacattttgctagaatagcaagttccctttaaaaacgtctcgacactattaaagaaatgttccttttcatcaacctcacagaggtggcaaaagtaaatatttgttatgccattgcagcaatctcagaaggaagagtgtctgatctagattcataaggctcgtcatagtaccaccaataacttgctacatagatacatatatatttttacaggagaacaatcatcacataattatacaagtaaggcaagaaggctatactgttggcaagtttaggtacataggtagatttatgtatcgaggcacacgttacgaaagggtatagtattgattgaaatatacaagtggaagggtcatactgcagatactattgtactgatagctttgacgttatgtcggtcgatttattataaaaaggatagaaagtataagcatcgaactgacctggtgaagtaggaaatcattaatcatatggggaagatgatatgaatacatgctgtttgtaatattatatgataaggagtaagttatgtaccttgctgtattcaaagggcaaatcacaagagatatagcaaaatcatggctcatccaccttgagttccttgaggttgttcatgtatatctccattgctctctcgacggaacagcggcagtgaggataatatccatcagacgtaaactcaaatagaactttgacagctcccttctggatccacattgctcgagctaatggagctcctccattggccatttgatctacctggggatcctcatcagcgatgtctgaacgtgctgatgaagcctagagagggggggggggggtgaatagactgtccctgaaaacttaaaaacaaatcgcagcggtaaaattcaaacagacccggaacttcctggtaaggaactccggaacttccggcctgccaggcccggaacttccagtgttgttaggacaggaacttccgggttacataacaaggatgaaaatcaaatttcaaaacaggagactaagccaatcttcacaagatgatgcacaggtattctaagcaggggatagatcacagaaacatccacaaaaacatcacagaaagagacaagagcgattttttcccgaagttcggatcttgtgatcctactctccgttgaggagctccaaagagctgggtctcgattaaccccttgcctcacttgtgcgaaaaccccagaggaaatccacaaccttcaaccccaaacactcctaggcaaatttctagaattgagtgaccaccaagatccaactcaacctacttctagaaatccgccacaagtgtaggttgctctacttggaaaacctttagaatctcagcacaagaacttcattaacttacctcgttccctttcggaggagaggagatccttcacaaacttacccaggacatccacaatatgcaacggattctcgcgggcgacatctaaccgtctaggagatcatctccaagagtaataagcaccgagatgacagcccacgagatattccaagtgctcacccaagatcctagtcttcacacatctccaaatcttcctctctccctctcaatctctctttctcacaagaattaggctctagattgagtggagatggcaagaaacacttaggagaggctagcaacagctctagggatgaaaagtgaaagtggaatggccaaaaaacgagctggaaacgagctgtatatgtttaacggctaggtgacgtcatctagccgttactcaattttgaactggaaactagacatgaagttctggacctagaagacaggaacttccggataacacttaggaaaatttctttcatcagaccggaacttccggacttggaagacaagaagttccggacctgcatttttggacagatggagtatttgcaaaaataactcctagggaaactttgacacttggttcacgctaagagcacttgacatatctcagagcatcacctggaatccctcttaatagtacggtttatcctaaaaactcgattgcaataaataaactatcatatacacttctcgagttccggtccgctttgattttatacttttggggggtctccaagcatccaccttccacaccttggactaatgcatctgaaagtagctcaataaactcattaatctcttaaccacatttgtcattaatcaccaatacccactagggggattaatgcacttccaatgtcttccatagatgccatgatttctgcagcattggaaatggaattagtcttatgataaagaagtattacactaataggggattgttcaatgtattaaatttataataccatatagttggttagttttgaggtcccattcagtgttttagattcatattaaaatctataccttgattgatgagaaccacaccagggaatgtgtgggtaaccaaaagaacaggcacacaaaaataaaattagcattggggcattgggaccatgaatatagtgttggtttcatggttcaagctgaaagcgcacgatatggtgggaggtagtgaggcacaattcaatttccataaacttgcatacaggcttccaagggaacaaagaaattgatttgtttgatcagatcaagcaagctaatagctagacctagaccgggaccaaatcaaaggccctgtcagccataaaagtagaaaataaaaactactctaacatggaaaagcttactctgataaacataagcagcacgaatctaaatactgatggcaagctgaaaaaggaaaaatcaacctcatgatgaaacaatcatgtataatatcatttgttctgttctggtggtaggaacatgagatatctcatcatctcctaccccattcagagttggttgcgaatattcttttaggaaagcaactctcttattcagaaaacaacaacagcaatatatgtagagcatcttacaattctaattgtatttggaagaaagtatatgaacaacaagcatgtgttgattctgtccttcaagttgtttcaatgttcattgctcatatattgttttcgtaatgtacggactggtaatttaaagtataggattaatgatctgtctatgctgataagctgattaggctaaaagaatgagaacatgtagcttgcggtccacacgatggttattatccaagctgaatatgcaggggaaggcaacattttacaacatgcaacaaaggtcggcctctctcagttcagacagcatccaaaagaaaaatataaacacgcacacttcattaataacagtaacaactgtgattacaatctagaccaatctccaaaatccaaagctggaacaagtcacgtttcagagatcagtaacaacaggagcagaacgaaacacttgtttgaatggcatttagaacaccgtacccaatcagtcaatcaaatatgtttcttacctcttccagtataaagaagattgctctctaaacgatggctgacccgcaggtacaccagatccgagtctccagagcgccagttgcgctcagctgcacgggatgcggcctagagacttcgcaacgatcaaactctgctggagaaaagatcgacgagggcatgtgagcgaaggatgtgacagaagcagaccaaaggaacaaacaggaaatcttatggcgttcttacctaagcaggaaaaaccaggaaaatgtaagtggtggagaggctgatggtgagtcggtacccaccatgcacgaatgcaaaatagctgcgagtttgagtaatggagacgatccaaacgaagaacaattgaaatttgttgatagaaacaaagacaaggaatagaacgaatcaaacgtgagcatggaagaccaagaaacatatcggcaaggaaacttcacctgagtagatctcacccgtcaggatccatgaccaaatgagatgttattcatcgctcgatctgcagtcgtcgacccacaccacttgcatctgtgttcaccgataaggggtggagaagaggggccgcctcaatccgccgccgaggttgacaccgtccctcaatctgccaaggttgagctcggcggcaccgtggagcttctcatccaatacggcgacaaggagcggatggcgacgaaaagggcgaaaccggctggtgggagtgggaggataacagttgtggcgccgccggctgcgaccggagcggacgaaggcagcggtgtcttagagcacccgcaatggtaaagtaaggtgctctctataaaacatgtacatcttaacaatatactcgattaatagtaaaccatcttaataatagtatgtctacattggtatctatagctctctcatgcattgccttgtttttctctatagactatctctaagttagtagatagctttgctctctctctttatttaatacattccaagtagaaaaatatgttgacatagatctcttgtagagaacctatagataaccattgtgggtgcccttagagcaagtataatagtgacctataagcctactataaacttagatggataagagaggtagtgaaaaattaaggatgttggctctcatacaagagctagcttatcacaagctccaagacaaatacattaaatgtataagtgagagatagagagaggagaaaaaaattgtaccaaccttatagctaatctattatatatgttggctttaagataggctaatagtaggaagttggctatattattatccttgctcctagagcaggtttaataaggtagattgagccggcgatatgagctacacgtcagattggatgatgacatggacgagagaagggaggaaagagggtgcgagcggacggtaaattaggtggtgtttacatccagggacttaactttagtccctgtctttagacactaatttagagtattaaatataaactacttacaaaactaattacataaataaaagctaattcacgagacaaattttttaagcctaattaatctataattagagaatgtttactgtagcatcacataggctaatcatggattaattaggctcattagattcgtctcgcaaattagtccaagattatggataggttttattaatagtctacgtttaatatttataattaattttcaaacatccgatgtaatagggacttaaaagttttagtcccatctaaacagggccttagtcgccagtgcacacgagctcctaggcgcctgtgcattgctttttgtcagtcttgcagcggagtgagagagggaagggtaaagaagaaagagattgaggtgattaaaaaattaataaagatattacttgtttaacgtgtcaacagcttactattgtactctctagctataagatgacatggtacacatttatagcctgtagctggcgatactattagagcaggtacaatagcgggctataagccagctataaatatattttaaagagataaagaaagagagagaatagcagcgggctacagatatgtagccagctacagtacggactccaaaacgtaacgagtgtatgacaggtaggaccgggtattaatagtatagtaagcaaccattgtatgaattggctattatattggctctagatgatttggagttagtagttggctatcctattaaacttgctcttaaacctgctcttagaggagatgagcagtgagttggaaggtaacgtgagcaaataaatgagcttagcatattgatcctacgctttccatccccacgcttctttctttagttctaatactagaaaaatcatcagcacgccagttggcgtgcttcaaaatttatagcctgtgacatgatcagaataattttgcaagtttttacataattaatttaattatcaaaggttgagagtggaaatacaatagtaatatatgccttattatgttacctacttgttatttaaaaatgcatgttcagtaagaaattacgtgtagctttcataaattggaaaattttgtttgcgagctgttggattttcaattattatcatagtcaatcgaccacatctagcatctgaaatcgtcagagctatacagtgcaactgatatccatgggtgctttctttttcttttacattgtgatttttttaaggaacacagtagaggaggctccgctgttaaattttacattttggattttggtttgtttctctattttttagctccctttttttttacatattttgattttcagttgtgttatcttttttttggagcttcaaatttagagatatgtttttttttacattttaattttccattgttttctctatttattttttgagctccagttttaaagacctgctcaaaattggggtgcaagcgggtcacccgcgaacccacttataggtcaaaataaacgagtttgcaggttagtttagcctataagtgggtttttgtgggtagccgcttgtacccttagctcaaaagcatctaggctctagacttgagttgttgatttttctcaaaagaaagtcttggccttattatttcttttgacaactattttttcactataacatgtcattatttattttccaatttatggtatttctcctagtttttcctaaattttgtgctgtatcgtttttcgctgtgtaatgtttattctagggttaatatttttgagatcatccaaaggatctaggtgttcttaatttaatttattgactatacttctacgagcttggaagtatctagaggattgtaaccatgaaagcagagcgtagctagcaggctagctgcaggctgcatcttgtctttgttccacatgtcaacattttgtaagtccatgtggaccaatcaggtaggagaagacaggccagcttgagaagttactgatctgactatctaagattgcacagggacacgtggctgattttcagatgaactaaccctaaataatcagtgagccacgtggcccaatcacacgcctcatttccacccctgaaatcgtatataaagatttgtctgatctatgggcccacataactaaaggcccacgctgcagtgattgatgcagatgcaagtttaccaaagctcgtgcggtatgcgaaacggcgtgccttccactcgaggcgacgacgcccgcgcgccccttcggcttcggctcacccagccaatgatccgtgggcctagcaaagaccaagcgacgcgattggcaactcagatcccgcaccaagcgtgggcgcggcagccgaagcgacgatacgtgcaagcaacaaaaatactactccctccgttttaccatgaaagtaattctagtatttctcacatttatattaatgctaataaatttaaatatatatatctatctagatttattaagatcaatttgaatgtggaaaatgctagaatgacttacatttaaaacggaggaagtacaaccgaaaccaaactcaatcaaacgctgaccaatggacccaacaaaacaaaaaaaggcccaccacacaggcaccgcaaaccaccatacgcagcaacgatgatttaatcagaaaacgcatgcacctaccaaccacgaggccactacccaactgctccacacctgcacctatggcttctttggtaactcgaaggaaggggactgagagtttacataagagaagtgatgatgagattaagatataaatttgatttttaatcccaatacattgtttggtagaggtaatgaaaattagtagggagtttagttggagattaggtcattaataaaaacggatgactgagatttgcttagagaaagtaatagagaaagtaaaggaggaattccctcccatcctcccaattacctgcccctacccaggtattaaaaaggagggagttccttcctcaattcctcatctccatcccaccaaaattcccatgtctctcaaccaaacaaaacatttaatagcctcatccttctaaactcccaatccctcctaaaaactccctccaaccaaacaggccgctaggcaaaactccctccaaccaaacaggccgctaggcgcacaaagccgcgcggcaattggtccacgtaggacagcaacagttaccaagttactgcacagtaatctgacgtggctcgccccggaagacgcccagcgtgcgaacctttataggtttcttaatggagataccatgttttttattttattttgtttgaacgaattatatatggagataccaggtcagccatgctgaataggcaagcaaaagcaacactcaactccctgatcacaagtttacaatatctcggtgccagaaacgggagtgtaagtgcaggaattgatttcaaactttttgggttgggcacgatttactactacccaggggcgacgctagagtcacttatcggggtcagtagaccccgacgattttttacaaacatcttgtaccagcactaatttaccagctacgaccccagtcaaggaaactactagaccccggtggtccggtgatattgttctggtcaagctcaattagcaactaaacaatactaacaagtagtaaatagaaaattagctagcacttattatacaacagcccaatatacgtatgagatttgagcccagaaggctttgtattcctgctaaacaagtccacaaattgccttgttgtgctgctctgtattcctgctgcagtgcagtctggctcgaagcgcttcgcccaatcttcgccgattggcaagggtaacccactaaccccatcacaatttcttaattattatcatcacaaattggttgtaggctggtttctcaagtccaaaattttaggaagttagggttctgaaatatgaaatttctccaaatttctgttacataaacataaatttattctttctagaaaagtggaaggtaagaaattagtgattttgatcatctacagcagcgtgggtattttgttttacatattaatcattccattttttaataaattaataggcaagcaaagtataatggagtgtgattcttgagaagaaaaatacccacttactagttcatgtggtactaattctcctttatcattggagataaccttctcggtaattaaagttgtgtagacaatactgcacgcaatcgtatcggtaataaatatatggattactccttgcgttttaaaatatagctacagttccaaatgatgacgacgtggttgttcgttttcacaagatgaaggatcgtaactgtacacatgagaagtttgtaacatgtaaaacataaccactttactaaaaaaactttattttatcatattatatggtcgatagttttgttctaggattatcttaagattattataagctatagtcagttagtggtggccccggtaactatttttcctggcttcgcccctgctactaccgattaattaaacctataaatcagctctgaacataatggtgccagtttcctacgcaataaactattagtgaacatagagcatcaccattcaccaagttataactgctttcggtgcacaaggatcttttcgaaccgacgtgacaattgtaataaatttgcattacaaaaccgaacatctattgaggggacaaaactctaaacatatatagctgtcgattttcatgctttttcagtttgataaggagggatctactataaattcccaattagtttctagcagactatgatccattcgcgcggtatgacaagaacatagacaaagttttagagcaaacaaaaatggtgttacgacactctgatggtcatccaaccacattaaaccagtcagcagcttgcgttcctgaaagcataatatcatgaaaatcattcacggaaaatcttaagagaaggatggcccagacaaatcatctcattagtaatattggatatacacaaaaagcacacccctcccctgtcgtgcctatctgatcagcaaccacttaagataatcagagcattaatcaagaaacaatgtgattgtaggactccaaatgctcactgcacactagctaagctttagaatgtaacatcagaagcatttccaagagcataaaaaataactaaaatgataaggttccctcaaaatataactagaaattcagcacattattgcaaaccaacggcaaccagatgatcgattgattcttcttcccgggagcataactcgcaggtgccatgattttgtatgttccttctctccagcctatctgtcgtccagcatcgaccctgaattttgcagttaccgccgtctagcagaacttacagttcatgaatttacagaatgcaccacagataaaatatgcttcattagtttcaaatctaattaaattgcaaacattggccctgaatagtcaaaaacagacacagcacaaaggtgtttagctagtcacatccatgaaccactgcacgaataggaggaaataaatagcatctgaagcagtaattctcaacaaaatttcaaccagatctatctttagcatgatttaataatgcataaaacaacatcatgccttaattaaactctctccaatatccattttatttagagtgattggataataaattcagataagctatctaccatcttcattgctctagtttatttaaggaaccaatcagcagcactagaccactggtactctggttcacgacatccatatccacaaaacccatgtttttcatgtgcttgacattcattaagaaacaaccaacttaagtatgaactttgctgaaaggacttgagagtctgaactcaacccaagtcatgcaaagtacacttttggcctaagcaaacgaatgaagttttttttactgccttcagtagagataaaccaggtaatacaattagtgcaacctcgtttacagaaactgatctgcaatatttcaaatcactcacagccttgcctgatcaagattaagaaacatgccactcgtgcctatttcagaacatactcgagcactcagtcagttaaacctcaactaagttcatacatcaacaattttgagattttgagaaggccagaagggccaatttgctttgaaaccatcctaaaaatctcggagttgaaaaacaccatcatatgtgtcattgacatgagagcctaggctctacacgtcattctcatcatacatactgcactgccacatccggttctagcataacacacagcacaggagaggagaggggaaggaagaaagaaacttactgcggagaaggtgaccaccgaaggggcagtgctgtgttgccgtcgcaacatcgccttgcaccgcagccgaccgaggaaggaaaggccgtagttgaccgggctagaatccctactgggcttaacccaacggggattccccgtgggcctcgatctggctgttcctgctccaatcaaacaagcctctctagttattaaatgaatttttttcatttttagatttttttaaaaatatttacaaaaataatctatcggccaaaaaaattacaaaaatagaccatgccgccccagaggtgggcggcaagctgacgtggtagacggcgggttgaccgcgccgtctgccgccgtcggccaaaattgcatttagccccttgccgcccctacaaggctaaatgcaattttggcagcccataaaaagctcggggctcgtacttttttgcatttgggccccttgccgccccactagagggcggcaagggacccatatgcaaaaagtacccccaaatgatttttctatattatgttaataataattaaagaagtatttattggtaaaacttgttaatattgttataaaaatgtattgaagttggttgtttcgcaatttcatatgttaagtaaggtattattttgtaacttatttgacgtattagtactcggataattgatataggcctatcgcagtctcggtcgtagaaacattatatggacttaaacaaggagaattatgtaacatgaagaaatagtagtacaatttgaacatgatacaactatttccattgcggttacatagatgatattagattcgaactaggagggaggtagtgcaatagttgaacacaacgacgatgtagtaatgggataaggaagcatgacagtagaaatttcaatatgccaagttgtccgataatagctaacccctacgtgaggatccctctcctctctcaaaccgcgctttagtaaccctgtattgctctgatagttcaagctgcacaacacggctaggtggagttagaacacttctggtgtctatccattctctatattgacatctccttggtggttcctgggaggaaagaatagatgtgaagcgagcaaaattagtaaatgttgtgagaaaataaggattcatgtaatcaaaatattcttaccatgaaatcgtcatcaagaatatttggacaaacaaagaaccttcgacccaatgttgtaggctttatggaacgaagaacctgacaacgatcaccacacctgcatcttggacgggcttcccatggaggtagtgccgtagttagcacccgccagtcgcactattgttcacgacattgtcattcgtaagccgcttttctctataagtattgctcagtactttcggatgcgaaataccagcgaccttcttgtaaacaagtggttaggtcgagaacgagattttctgtatcgacccactcgatgtatgcgcaagctgtagtgcgggtctgccgaatagagtagtgttacaaagaataaaacgattgcccatacggaatgaataagcatatgcagatagtaaaatacctcatggtcatagttaggacacctaaaaaagcgccttcctcgaatatcaggattcctcgaagccattagttggcatcgatcaccgcataggcagagaggacgctggcaccaaggtggtagtaggtatacacaaggatctctacgccagttcggatcctcaacgcccaggcgtctagccattgacgaaagccggtaggatttgtaatgaagcaagtggggaagagagtactgaatgtgattgagttctgaaagattgtgaggcctcgctcgttaaggcgacttatataggcaccaaaaatcgagtgatatccctgacatgtgaacgtggcggggcatattgggtacgcctgattggcaccgaaagttacatgcctgattggtgccgaaagttacattggtcgtatgcggaaaatggcgggcaaatactcgtatcgcacgcgaataaaggaggctgcatcggtgcggcagaaagtagtcgtacatgtgccgaaaggtatcgtgcacatataataacaatgtattcattacacaagcatacagtactagcatgtgaagcaaataaacaaagagaagtctgctctactggccctgccccgcgccgcgaccacgcttggtcctccgggcctgtgctcgcacgtggtcttgggagtaggtgaaacgatccggtggcacagcacgggtagcacgagtgtctggcggcggagtggcctgcgcctggtcctgcgtctgcaccggcggtgcgcctcccagctgtgaggggccgatgacgtcctctgtcgagcctgaagcgaagtcgaagtcagtgatgtcgaagagcaaggtggaagccaccaagtggtccgacgaggtcccagcatggtccagtggtggaccctgactcgacgtgccggctgcctgtgacgaagtcccagcgtactaccagaactacgctgagtgcgaggtcgacgcagctgcctgagacactgaccctgcagcctgggagaagtgggcggcctgcgtcgtagcgaactgggcgaaacctacacatcgacaacgggacccttataagctaagacataaaatgcatgtaaattgattgtcgaagtactgttgtttttttaagtacctgtggggggcacaacataaggcctagccgaggaaggcggggtgctgaacggtgcacgaaaccctgaagcaatcggatgaatcgactcacatagatgcgcgagacatgtacaaaaaaatccttaaaaatacttacctccgtgcggaaaacatgtatgcttggtaacaaatgacactgtccaataatccttccattttcccttataagcgtgcactctccaaggacaaccatctttttccttaacacaccgaacttcatattgcgaccggttggacttggcaacccaaaactctctatgaagtgacactgcaaaatgttttaccgcctccttcatattttctgctctagtataaatcgctccctgaataacctcattttctttgtactcccatctcacactatcctcttcaaagacgaccaaaccagaaaaatcctcactagcccaatctgctggattaatatccgtctcatcatctgacgaatcaccttcctctacacgctcgttgtcagaatcctccctctccatttcatccacaatggcacagacaatctccccctcgtcggccactccacctggttgaatgcccactggagctactacgcccccgtcctctcgtgcgttgacctcttccacagaagtctcatttacttcagcacttggtccctcaccatcatccatgttcatctgcacacctggatccttcgggtgaacaaacggaaccatagctagagaccacccgcgttgcaatgcattttccacataccatctccacactcgagagttttgaactggcattagttcccaataaaaaccctcagttacctgacttactataacattgattgttatgtcacttgtctgtggatcaactctcaagcccctcattaaccatccttttatagaaggtacactcctctcagccagtctatcaattcccctttttgatacaataaattctgacagatctaccacagttggcccgtaacggacgtttcctaggccatggtaaacttggaatatttgtttgttcgacatatctgtcaacaaaataactagatcatattactctttcatgcaataaacatctacaacgtaatatcttcttgtgtatgccaatgcaacggtaaagtactgattccaaactagcagatctacgtagttaccgatatctacaatacgcacttctagattagtacaactaaaaccctaaaaatataatgcatttattcaaacaaagtttttaaaaaatacacagtatttaactcaatagtcacatataggatctatgaatattacctgaaatcggcgtctgaatccggcagggcttcgccccttcttctcttctcctcccctttcttctttttttactggatttgtggggggaggaatgagggctgggggctgggcggcaggccttttataggcagcgaggcctgccgcccggccagagggcggcaaggggccgcctgcaaaatggccggccccggctggcttttttgcattggggccccttgccgccccaacagagggcggcaagggttttcctgcaaaaaaacctccctccgtcaccgcccgtccctcccccgtttgccacgtcagtttgccgccccggaggtgggcggcagggtctatttttataatttttttggccgatagtttatttctgtaaatattttaaaaaaaactaaaaatgaaaaaaaaattgttattaaattaggcctcttgggtagacattgatgagaaaagggcgaaaaaaaataacagcacgatggaatggaatggggtgcagacaaatcgatctctaaaaaagagctgcagaaatacgactatgggattgggttttcactcacttaaatgaatgaaccagtaaggcaaaagagtaaaagaacttgggttgaaagctaatactcaataatctagcaagaatgcaccaagctgtccaagcacaagtcccaaaatccaatccattcacatagagccaaatcatgaaaatcgagagagggaaaaatggaaagcaaagcttaaagtaaatctcaaacaaagttcaaagccaatccaaatcctaatttgtaactaactttatacacataatcaactcaaacactaacacaattttcttttgaagaatctaacatgaaaattttaaatcaagaatcgggaaagattcaacttattaaaaagtgataaatttgaagaaaattaataccaccttatttgaatatgttacaaattatgtaaatgtaaaccttgatagaacatcaagacacttgtccccttccttttccttctgcccttgttaattgaatgttgtccatcttatcaataaatgaggtatcgatccaaattgcgtatcgagaaacaaagttattttaaaatttaggcatttatataaaaagatggaaccagtgatacctacaattatgatggtcgttactatatcatatcttgtgcaataaataataggattttctatacaagtaaataaatgcattaaatatcttgcattgattgcagcataatacattttaaacaactagttgtacctatgaacctataaatataatggtgtacacactatgaaatacaccactcaagatttccacaatgaaaggaaacaatattttccgagtggcccttttgtcatatattattctcactatcggaggaaaggagctcaaatccacaaatagtggagaaaacacaggtctaacattcacaaatcaacaagttaataagactgttcaggtatgtgcaagactattgatcttttttggagggtgtattctgcatcgtttgatgtctaacaagcataggtaacataaaattagacagaagatggtgatatatacgattgtgttgacgtcaatcaacagccaacctttaaacacccgctgttcaaagaccatgaaattcaggtaaaccactttctcaaagctattatttgctttcacatggtggctaaatttgatttagtttaatttcgtccaaaaattatatgtagattctttcaaattcatgattatatataataaataggtactgcaagttgtagctaaaatcatgatagcaaaattctttaaattggtttttattcacgacaagccatactatttgcttcccattcgttgcatattataaaacgttttgggtttgcccaaggtcaaatttcttcaagcttgaacatgtctataggaaaagtagcagcatctacaacacacaattagtttgattaaattcaccattgaatatattctatagtatattttgttttctattgaaaatattactatatttttatataaagttggttaaacttgaacaaatttgacttagaacaaacccaaaacaactgacaacatgaaacggagggagtgcattttattaatattcattatttatctactacttaaactctcatttaacattaagaaatgaaataattaacttatttttgtaactatgctattatcaactatacatgcgaagacttcatggatgtcttttgtcaagtctatattgagaatgttatttgtgcatgtaaaaatcaccctatcccttattgcccatgacgagtcattgacacctgggcccaaaacccgcatatcattgagaataagggatacggtcaactttcaagagcaaataaggattttatccaatcatttactatacggtgacacagttttacatctcaaatagatggaaccaagctcttcccccataaggttggatatcaaatcgccactggtagctgcagtctcacatgcacagttgtctaccatcgactgccccataggaacaattccaattctgcgtaacaacaaactggacaccacgatggtgcaaggtatcagcacgttggctagcaatgatttacaacaactggtaagtttcttctcataaaattttaaaattatataatgatcaaagtctgattacgatcatactgaatttgtgtgtagtcccatgaacacatgttgcacactactattttcaaaaccacgattgtgactattcataacctatttatggaatatgatcattttcaaatcaatctttggatgttaacattaaaattcttaatgataaacaataagattaaatatatgttgtgtccattggtaggaccagttatatagaaaactataatttcaaagctttagtgctattttaagtaacaagtagcttgtaatcattctgaaactttgatactgttccataaacatgatatttgctcacatgaatattatttcaatggcattgaaaggactataaaatcttttattgtacccaattttacaagtacttcttgagaaggtcaaatgatgttggttcaagttgacaacaataagggattggaacttctatgtaactagatggtgcctcatgctttgctttgaaatatatggatgattgaatgttgagtattgttgaaatgatggatggatacattttgaaatattatagaaaatatgtgggagatgatgatttgacatgctagtgtgttgagctatagaatgtaataagttgtagatgatgtgtcatgcttgcatgagctttaaatgtaacagtttatagtgaatgatgatgtggtatggttgcatgttaagctttagagctagtaggctccaacttagaaggtactccctctgtcccaaaatataagggagcctatccagattcgtagtactctactaaaatgtgttccatccaaccaaattaccttatattttcggacgaagtgagtatagatatgccatcaagttaactacaataagggattgacttctatgtaatatgtcatcatgttgtagcactgaaacatgcataagtggaaaataatatccaatgtgaggatggtatgtgggcctaggacccacattgtcatcctcacattggacataccaatgatatttttcaactccatcatcttatctctatagtgcttatgctactcttttcattcacaacaaaatatcattggttttttcattgcaggtagcaggaatcaaatattgggatgagatatacggatcacaggcgtcaataaatgtctatgaaccaaaagtgaagcaagatagcaatgatcttagtgcatcatggatacaaattggtagtgtgccaaaggtaggcaaaggagttgggataggtgctgggtcatgtgtttatccaagcttcagtggcgacagctttgctaggttccatatttcttgggtaaggcataaacaatttttttttaccatgtgcataattttttttcaataagcatctataatgaccatataaattttaaaatagggatatcatagatatatttgatatatttccttattgactttgcaataaattttgataacaggataatgaagaattgaaaaaaaattgtattgatcataattgtcctggtttcgtgcaagttagtcgcagtgttggtcttggaggaagagtacatcctatctccgtctataatggaccacaatatgtaatagatgttcttatttttaaggtattgttctattcttaaaatatgtatgattagttatattggttccatgtctaggcatgcagtttttgtacaaggtaaagctcctagatttttgttttcttgcaaaactagtcagttcactataatattagttgaactatctatgataattaagtaatcatctcatactcagatactttatatgcatgtaagtaaatttcttaaaatgaatttttttgttacaattccattaaaacaagagaaactacataaggctcacccacataaataattatataatatttgtgcacgatcaacataaaaaatgtttgggcatgaaaaatatttttgaattgtctaggtatgaaatatataactatagtaagtcgagtaagcataactgaaaccattttagttgccttctggaatcaatatggctacaattgtcatacatcatgaaactagcccaaaccaattcaaaccaagatgaactaattacatttttccgagtttgataactcaagacatattagtgttcaatgctcattttacttcaaactacggagtatttacaatatattttttatttatattaggatccaaagactaagaattggtggctagcatatggttcaaataatacacctattggatattggccgagttcacaattttcatccatgaaggacaaatgtaattttgcattttggggtggatatgttcaaggtccaacagcttcttcggacccaccacaaattggtagtgggcacttcgcttctgaaggatttggcaaagcagcttttgttaggaatattcaagctattgaagatgagaacaacaagctggttaccccaagcatccgtagtgcccatcctcgagacgacaatccaaaattatacacctatgatgactatggacttaatgatgatagtatgcatgtatactacggtggaccgggcaaatatagctaatggtgtgctttgcaaactgtagtatcataagtttttttattggaaataatgagattcaaaggctacatatgtggcatcataacaccttgcatgcactttgctcctatgatagttcgatgtaaattgtgaagagagattaattttgcaaacaagaattgaactaaataacacacttcattccccaagagccagttagggccacgccatctgtagcttgcacatcgtctagtctaacaaaggtcattatccaagccttttttattcaacaccaagcccattatccaaaaaaattcaacatcaagcagcctttgaactatgaaggtgttctctctgcacataattgctatcctatcctacctaaacttcagagaaataggaatgagaacgggattacacgaggattttggtctctctctcaagcaaggtcgactctctcatcctatgcattctagttgggagggaccggcctaataactttcgccagaacttttcggtgcagctgcgccttactctcctggtagcttatgggccttataggtcaagcccatgtatggatatttttttgtttttcttctttcaattcattttgaacaattggaagttacctaaatactgtattgaaagtttttgatatattttgaattatttctataattttctactcttctctgaaattcgagaaataatttgtaaccaagacttgtttaaatagatttatttcaaatattaaaaaagtgagttaactttcaactcaaattttgaaacttccaactcggatttgaaattttcaattcaaattttgaaacttttagctccaaatttttaaaaatctacccaaaaaacactagccaaaatttgaaaatttcaactcaaattgtgaaactttttcattcaaatttttgaaactttcaacttacttataatataaaacggagggagtacttcaaaagaatcaaggtcggatctagagtgtaaccagcggggcccttggccccactcaatttaggtgactgggggcaaatgcccctttgacactttttacttccttagtctacctaaacggtaaatccttagccctcactcatactattttctgtctccacccctaaaaagaatcaagtgacggatgaacacgacgcatcctcctcattgctggccgccttgcacccgccgccgcacaccatgcagacggcgaccacagcaacggccacagccaccatcgccccagctatctggacgccgcggccccgcccggcgacgatgtggttcaccgtcatccctctcatctgaagctctggatggattgggctgtgcgactgaatgtctgaatcgtgtcgactggctttatattttgcagctacagattgcttatgagcttaaacactttctcgaccagtccttaatttcaaaagtgttcattgcccgtaaaaaacgaagccttgtcggcgtggccactgcctgaaatgcaccaagaagtagcaatgcacactcttttcgtccttttctagatggattttacccgatcaaaagattgtagcattagacactctttctcctttggtatttctgatggtttgcttacaagatgattacataaataccgactcgagcttttcaaatttcaacacgttgtaaacaagagctcatgtcatcttccattgcaattacagcctctagtttgggcaatctctagcatgttttgtcgacaaggacaaaaaggccgaaggaggatagtatcttgatcatgagcaagcactgcaggtccattgttactgtcagaaatgtgatactgtatgtaaagaaatatcatgagtccattgcaggaagaacagcattacggtatgttcagaaaagaatagttaacttacatatccccttcataaatctgcacaaactctctcaaacctttttgtagaattcacagcctctcggaagagattcaactctgaaccaatccactctgaaccaatcaatgtaaggacaggagactattatatgaagcaatatatatacctttgtttgctccctagttccatctcgtgggcccaaacacgcaagtaatttgacgcgtggattagttacccgatgggcctctccctccagcggcagcctatatgggaggcctccagctgcagtgtgcactcagctcagcgcctcacttttcttgcttggttcaggttcagccgttcagtgaggctttatttagttcctgaaattaggaagaagtttgaggaaagttggtagtttggaaaaaaaagttgaaagttcatatgagtagaaaagttttgaatgtgatatgatgtgatggaaagttgagagtttggggaaagtttggtgtgaactaaacagggcgagtcgatgtccggtgaagttcagtccgatagtcagtctgtgtatatatctgtatcaatctttgctagtccacaggttgtaactgcacagggggtgagggggttaaaacgaaaaaaaaggaacctaagaaaaatcaaatcaagagttggaaaaggttcaatttgtaaaaagaaaaaagggacaatatggagaaaattaatagtacctactttgaatatgttaatttttttttctaaatgtaagtctatagacttcaagacaattatcccctgcattttccttatgcccctattaattgaatgttgtcagttttaccaacagaagagtgctatcaaatttataaataaatgaggtatcgattctaaacgtgtgtcaggaaataaggttattttaaaatttatacaatataaaaagagatggaacatgaaagcaatgatacttgtgcaattacaagacggccattactatatcatatctgatgcaattaataccgggattttctatgtcattaaatgcattgtaatttaatgtttgtatatcttgcattaatcttactccatatctcttaaatagcaccaatgatacctatgaacctataaatataatggtctacgcagtatgaaatagaccactccagaaattcataataaaagaaaataatattttccgattgaccctgttgatatcttgttctaagtataggaggaaaagagctcaaatccataagttttgccatgaaatagctgctctccaaaagctcacgacctgacgatctcgagataaacacccggatttagttaatcagatcaccccaggtataatagcatgctataatccagctataagtatattttaagtaaataaaagagaagagaaaaagagcagcagactacatatttataaccagctgtagcacggacttcaagacgcagtgtgtgtatgacaagtaggaccaggtattaatagtgtactccctccgatttcattttaattgacgctttgaacaatgacacgctctacaagatatacctttgaccttatttttctattataatatatacaataaataaatgcatatttacttttattatagtgttttgaaagacaaatctatatatgtttttctagtttctttaaactaaatatttttaaagttattgatggtcaaagttataaaagtttaacctcaatcttgtccaaaacgtcaattaatatagaactagagggagtagtatgtaactattgtacgaattagctattaaattaactatagatgatttaaagctagtagttggctatactattaaacttgctctaagagcacccgcaatggtaaagtaaggtgctctctataaaacatgtacatctcagcaatatactagattaatagtaaaccacctcaatattatgtctacatgggtatctatagctctctaatgcattgcatcgtttttctctatagactatctccaggttagtagatagctttactctctcttcatttaatctcttccaagtaggaaaatatactggcatggatctcttatagaaagcatataaataaccattgcgggtgccctaatcatcctccaccattgccaattaatcctctcccggtgattgctttgtcggtgacagcgtgtgtgaaagctcgcgcgggcgcggctacggcaacggcgaaggcgtggtgcgttgagattcgtgcagaggacggcgccgggtgcctcgagatgctcgtcgcggagaaagaaaaccgcggagtacgctgcagcgatggtgtcgttaaaactgaaggaaatgctgccgcgcgcgtgctgtgctctgctcgagttacagtgtacactggtgagcttagctagggaatatgattgattaatccatttgattaccctatcatgtcggccagctgaaagagaaaaaaaaagctaactaaatttatgataaggttcatcaattagtgaaatcatatttcaattagtggtttcagttgatactaatactgtacaatgccattctgagatagtagtactgtgatccaagtagactgcatgctccagtggtccgggccggcctgcatactcatcgataatcagcgagccatattttggcacccgtactagtttaccactcatggccgtgtcacagcatacaggccacttgtttgtatttataggacttttgtccccggttggcgacgacggtttgtacgtacgcaagcatgggccggcagctgtctgtgaaagaaaaaatttagtgctccctaattttaaacgcagtcacgagattcttttctagtcttattaaaaaaatataatatataaaatataagttatatataaagtattatttatatttatcatctaataacaacaaaaatactaatcattaaaaatttaaataaaatcagtaattaaaattggacatgaaaacttatggcttcgtttgaaatgtgccggagtgagtactctttaatctaggggaagtacttttactaccctactgtaaggtggtcagagaacacagctgcggttgcccgtacgattaagagctccgcccgtcagattgctgctggaaaatggaaatctgcttcgctgtgccatgtgcggcctttttactctccgtttttacttactgcaggatgtaggagtacatcagtaccagtactacatgtaatgtatactccctccgtcaaaaaaaaaaaaaaaaaaaaaaaaaaaaaaagacaaaccctagattttcatgtcaaacgttcgaccatccgtcttatttgaaaaaattatgaaaaagataaaaaaacaagtcatgcataaagcattaatcatgttttatcatttaacaataataaaaatactaattataaaaaaatctatataagacggacagtcaaacgttggatacggaaaccagggtttgtcttttttttttggatggagggagtatgtaatagtctctccatcccataatataagagaatttttttgtgaatctgacacatccttgttacaatgaatctggacagaccactcaaaatttattgtgctataatatattatattcacttaaaattttttatattatgggacggaagaaatacttgctgctacatatggggcactacagcttggtggcaaactggcaatggccgggcaggccggaacatgcccggtggcagcggcagccaagacggccataagactagcaccaccgcatgcaaatcaggtttatcttaccggagcgagggattacccatctccggctcaggtgcagggaaccctgcacatagtaatatacaggccaaatcaaattgcgacacctgtccagggtggccctacttaattacgcatgcaacggaggtttaacgaggactaaacgggtgaatggttctgttacctgattttgtgggatcgtggttaaacctccgtttacattgttacttggttgattgggtggacctaccttgtgtacaggtgtcgcgatttgatttggcctgtatattactatgtgcagggttccctgcacctgagccggactcctcctgcagtaagcttagttaccacgaaccaagaaaattgaacaacttttatgaaaaaaataaaaattttgttggaatatttttgaacttggtcgatatatgtcgggttgatatatatgtactactttagaagcggagctaccccttttttcccactatcatggttccttataaaaataacaactccctaaaaacaccatctcaaccaaaaaaaaaaagaaaaacattatcccactcaaattagggtttacacgtgaaaatcaacccacgaggaagaccatccaacaaaaataccatccaccagaaaaaccatatagaaaaatctagttgtacacttgattttccatgagaactacaataagtaaaagactataagaccctttcattcgaaggaaattcataggaattttagaggatttcattcttatagaaatcttttctatataaccctttgaatcaaaaaaaataaatccataaatcctatagaatgatatgaaattcctatggaatgcctaataccttgcaagttttggagaaaatctaatataaggtagaacctcgtgaaaactttccttcaaatctttatctctcctctaattattctgcttttcctgcgatccaatcaaatggtcattcatatgttattagagtgttttgcaatcccttttttatatttgcattcacatcaaaatcctgtgtttgttctattcctatgttttctcagtcctgcgatttaaagggccctaagtagtatgtgtggcctaataaaaacaaaaaatatttatcagtcaaaagaaaaatagatctaaaacgccgtactagaaaaatatgaaaagtacttcatttccgattccaagaaaaaaaatctgagttcattttcaaaataattgaaaattatttcccattttcaaaatgatagcctgatcgtattcgtttacattttttctaaaaaaaattgatttcgtttctatttatgaaactctccgaaaaattccaagtgatatttcccattttctaaaacgcgtctaaaaaccgaaaacttttaaaccgctttcatccctcgtcgtcgctaagtacttcttcggcgttccggcttgccaagagccaactgctctgcgctgcttgcttgctactccctccgtaccttaatatatattaagagattttgggtggatgtgacatattctagtacaatgaatttggatattcaaaataaactatattgactgtgtttagatccaaactttcttttttttttccatcccatcaatctgtcatacacacacaactttttagtcacatcgtaccaatttcaatctaaacttccaatttcggaagtaactaaacacaactattatggacggagtgagtatcgtacatgtattgcagttgaggcaaccgtgcaacgagactcgcctgctaacattgtccaagcagcagggcaaaccagccaagctgccagaccagccatcattcaccattacgactgtagaaataccagtaccaatgtactactgcaagtacgtataggattagtcgctagagaggtatagtgaggtaggtgcgccactccggccggagcagcatggagagagcttttgattataggatacagtgtttgaagttgttgctactccggcgcaattcatcagcaggccactgccaacaggcaacaggccagcactcactttggccctgttgttttcactttttcaggggtgtactcctactccgttggattaataccgtgtattatttgtatttgatccatgcttttaaaattacagtatgtttttttaaaaaaatattcttttctaccacattgttcagaccgtctgttctaaattatttatcaagtttattttttaaaaaaataatgtatttttatagttaagtagataattcactataatactagtaatgcgaataacgtatttcaaaatgatggaaaattggcaatgtcattataacttagtatctatctatctatctatctatctatctattattatatactaaaagtccattaaacttcctacaaacgctcctaagccgccacttggtgctctaataaattagagaaatcaaagaaattctaagaaaaaagcaaaacatctagccattgattttcacttaaattggtggacccgatattttagaccattagattaaatctattaaaatctttcctactaatatggatccgatgcatatggatggtgatcaaggtacgtatgtacgtactactcgcaaaaaaaaaaagaatcattccttttaatatggatccgatgcatatctatgcagactactcaacttttacaaacgtaaagtacgattggaaattaaatgaggataaagccgagaaaaccataaaaaccataaatactttttcttccctcgttttcattcttttctccatgagtacaggtgagataacaattaatattagtgataataaattttaaataattatactaagttaatagtgccccctccatcttagaatagattaatctagtacactaatactacgaatctcatcatatgtctgttcaaattcataatgttaaaatatgtcacatcttatattaatttaaaaaatttattctaacacgaaggttgcgctacagtacttctacttcctatcctataggtagccactccgaacaaacacaagttgtgttgtcactaccccatagagcaggtataatagtaagttataagccagttacaaacacattttaaagagataaataaggagagagaagagcagtgagctacagatttgtagccagttgtagcacggacttcaagacgcagcgtgtatatgacaggtgtgatcagatattaatagtgtagtatataactattatatgaatgagctattagattggctatagataaattggagctagcagtgggctatattattaaacttgctcttaattatacctgagttaatctgtcatcgatcgcaggcacttcaattggcacagtgacctaaacctgtattcctagtgagcccagccaagaaacagaggggaagaaaaaacatatagcaactgatattgagcacagtgacagggggcccacccagcagtgccccctaaaaccagatcagtggctgcgaaaagacaacactacccctgtccctgagctccctgccccccttagccctgtaccatcacggtttcatcagataagagactcgtcttcaggcttcagcgtttgcatcatgcatcagctcacagcaagttatatagccaactaataactttaaattatccataattaatttaatagttaattcatacaatagttacatactacattattaatatctgattctatcctatcatacacatattgtgtcttgaaatccgtgttgcagctggctataaatctgtagcccacatgctctatgcccagatttattgcgctaggatatgtcccatcctaatactaggttggtttttttaagtacggagagagtacaagtacctgctctcagatgggcaaaagaaaagcacagcggcaggcaggatttgtaaaatctcgcggttctcgccgttatcatctgtgctaatcttcttaggttttataatcataataaacctcacggtaaacgtatggttttcacgataaccttccggttttcgtagaatgacggtaatcccatttaaacggtttggtgatggctgagacggcaggcagagcagcgccgtatccgtcgtctactccgacaaaaacggccaaaaaccgggcttggccattacggtatccggaaggatgtcgatgccgacacggatcatcgatccgtccgtccgtccgttgcgtcgcacgctccatctgcagaattctgcacgcgttcgtgcatgcatgcacgcacccgcaccccacacacacccccactcgggcggatgcatgcgcgcaaccgacgaaacgaactaaattcaccctccaagtgccccagccacatgcctggacctgcaattaaaacgctgcgcacttctccgtagcaaaccatggtagtacacccttccacacatctgcttgtttttgttagcggtgaagcctattcccatggcctctgactgacttggataaaacttttatagtacatatcaggtttaaaggataaagctagaactttactcttttcgttcaaaaataaagcaatttagtatagaatagtggatacatcaaaatattataaatttagcagatttatgtctaaattcataataataatatatgtcttatcacgtattttaagacaagggaagtaaaagacaaatatacgattgaaaaaactctaaaatttatatttggttatattttggtactttctccatgcttagggcccctttgaattgcagaattgaaaaaaacggaggaataggaaaaatacgggattttaataggattgcaagtgtaaaacataggattacaaaacacaggaaaaatataggaatgaccgtttgattagaccgcaggaaaaatacaggaatgacatgatagagatagactaaggaaagttttccaagaggttagagtggatgttaactttccgacgtttttgctctagaattgtaggaataagaaatttcctacgtttttccttttctcattcctacaaatcaaaggcatgaatagtgtaggattttaattcctttgttttttctccaattaaaaggaggcctaaaatgtttgtaacatttcctgatggagggcctaggatttaatacagcaagagtacttacttggacacaggggtgtacgacgtacatatacatgtactagggcactgttgggtatttattggcgaagctgtaggaacatgaaggagctgctgctagtatcctaatgtacagtagtaatagtgcaaatccctctcatctttccgttgtactggtaggagcagtgcagtgcagggtagatcggggctgggtgtggcctggcctttgggtccttgggtcgctgggtgggtggtcccgagttggatgcgtgtggtggtggtcgcgtgggggtgggccggtgttgggatgcggtcgcctggggcaggcgtgcacatggagtaggcaggcagtggtagtagaagtgtactcctagcaccatctgcccaacaattgactcgttctcaccatgcctccttccttccattgatcagtcccttcccttttcacacgcatcagatcatcccaattcacagcaaccgaccactacccccaagctccagccaaaatttaaattttaaataaattttacagaactgtattatgcattgaggctgtttcgctactgggtttggagctgcgtcacaatcactaactctagctttagccaatatttaaataataaatatatttcacggaactataagggtagctccagctccattgcttcacctaaaatgggagcggagttagataaaattctctcacaaaataaactagagatgtgaagctggagttaaatttatgaattagagctctaacaaacagaccctaagtatcaaggttgtttcgctagagggtttggagctgcgttgcaatcactacctccagttctagccaaaatttaagttttaaataaatttcacgaaactatgagtatatagactgtttcgctgttgggtttggagctgcgtcacagccagcatgaacagtaccgcacacacacacacgtagcagcagtcgcctgctgaatagcccaattttgctacaacttgtaatattttggatacttcaaaaatttacaagaataacaaatagtataaaaaattacaagaataacaaatagtattttttttatccaaaaaaagtaattttataccatgtaggtgagcctagcttgtaagaacttaagtgtagtggcagtggccccaaatttttcggatatataggttgtaggtttctaataaaatcatatgctatatattcttgtggtagctcctaatgcttcatggaatacgcagcctactgatagtttttttataaactagttaattgtagatttatagaatttaactactctttaaattttaattttagatatgatttttaggtatttttggagttgattttaatgttttgatatcatactttattttccgtacttttaaagcactaaggtggggagcttctcccactctgcacgaaaaatagtatgatttttcgttaaagtatgtttaattaagtgttagctaaaaacttaaaaaatgattaaatttatttttaagtagcttgtcagtagaatattttagaaaatacagtgtacgtgaaaaatgagagtgtagaagttgtaaaacctaattatacaaattatacctgttaattattgtgattgtttggtgctattttcctagagcaaacgatcaatagagcaaactcacgtttaatctgtcactgtcagtctgacacccaaattactatcttcaagatcaccattactgtagttaattaccactgcttaattaactacagcctagtctaggagtgagctagtgactgcaacaagtggtgtaggagtagcgttccagtgcagtgcagtgcagcagtagtagtagtgtggcagtgcagtggggctgacaggtggggcccacgcacgggcgtgcctcctggagcgggacgcgctgtcttgccgagctcgagctccccacccaccgtggaatgggtacgtgaaatccgggggagaacgccttccgatgcattttgccattgccctcacccctcaggggcagcaccgtcatttccctccctctcccccaccacctcttcgtgcgctcgctcgccgcagatctagctacactagccgccctatttcaggtctccagcgccattgccgcgtgtggattggacgcttcaaaagcctttttagccacctcgtagcctctcacaagtactacattttcatctcgaaagaaagtgaaatcatcaagaacttggtgagaatcgatcaaagagcagtgccagctgcagctgcagcagaggatcggaggaggaagggggagaagaggagatcggggagtggagagacgaaaagcagcagcagtaggtgagttggaagtttactgctgctgctttgcctttgcatggatacgtttgatcttttggtctaaagcgtgctcttgtagggagagagtacaacgtcgtcggcaactgcattgcattgtccatggatttgtttatagaatatatcttgagctgtgctggctttcgctttcttttacattgcctttctcttttttcttgcagttgcagcagcagcagcatggaggagagagtgaagattggaggagacggcgaagaagaagaagaagaagaagcagaggaggaggaggcgccattggaggtggtgagggcagcgaaaaggagatttggggtggtggtggtggtgggcccaccccccagctgaggaggagcaggagaaggaagaagagcgaggaggagaggatctcctctcacgtcaaaggagggggaaagcagcataaaggcagcagcagctactggaggagaagaggaagcaagagagctcagcttcactacttcactggctcggccaaccaaagcagcagtcgaaagcgagaaaaaaagcttaagaaagaaagaaagctagcttcagtgagagtgagaatgtggggggagatagagagagagagagagagagagagtctagtgtgtcttgagagagatatataacaccaacaactcccagctgtgtgtgtgtgtgtgagagagagagagagagagagagagagagagcatctggttcttgtaccaccaccaccactgccccctttgcattgtccctccctggccacttctttctccttctccattttgtgcctagcgtacaaggaggtgccctgcttgctgctgctgctgttcggaagctatggcattgcaagaagaagaggaggatgatgaagatgatgaagaaggggagaaagaagaagaagaagacggtgtcagggtgcgtggggagctctgatttctccttgtcctgaggtgtgctgtccacttgtggatgtagtaagatattggcacaataggctcaatcacttttttcttttcctctcttcttttctcacttctgcttatttttgctgcttgcttgcttcttcgtcttttttattttccttcttcccctcaattcatgatgacacgttcttccttccttgtgtaatttatcaccgttcttggcgttttgcctgatttagaatgcaactgaaaaaaaagaaaaagatcgcagaggaaaaaaaaaggcagcagcagtgggtggtgaaagtatggaaatctctcctgctagtatacgtttgtcgtgtcctctttgttgtgttcttgtcttggtgtgttgagatcatgcgagacgagaggtggttcgagagcatcatgagcaatgggaaaatccatatctgctatatcttccctccgtatctctgcctagctgttgcgagtgtgagtgagtgctcgccatgatgtccgaggaggaggacgacgacggcgacggcgacggcgaggtcggaacggagacggcggccatccatctcctgtatgttgcttgttgagtctctctctctctctctctctctctctctctgtctctctctgcgtcgccttgtccgtttcgcctcggtttgatcaaccaaccctgtgtgtgtctgtcactgtgtggctggctgtgcacattgccattgccatgtcctgtgccatgccatcccatgacacggtgtgtgcgtgagagagaaggcatagtagtgtgctgatccgtggggcccacggtggaatggtggtggggcccaccaaagccgatgataccaatgatcatcgtcataaacgcctctccttccgtttcagagttaggagcattaatgatgggggaggggagagggaggtccgcatgtcagattacaggtctgattagcccgggcccaccactccgtgatactaacagtgattacggatgtttttggcttagcttgcagctttgcccccactgcatgaatatatactttacctgtgcagtgcagaaaaaacatgctctaatttggcaaaggcaaatctcttctcttgctaatggcgagtactgtagtactccacttaccactactactaatactgttgtgagaaacatctcccattatcttaagaaagtactgtagttagagtaggtaggagtggatgcatgggtgtgtgtggccttggtgttttgctgtctgtatcattgttgtgatggggaattggaaatttgcattggggttgtggtagctacctgttgctgcagtgcgcagcaatgcagcatggtggcataatcaaaatggagtagtcaagaacagtgtagatgatggagagccccaagagggcagggcagggcagcagcaatgcaatggcgatgcaaaggtttggtatggttggtggtggtcgtgctgcctgcgatgcaggatggcagacgcagatgggctagctaaccgatggatcgtgtggaatcgattttggggttttaatttaatttttgattgtggtggccgtactgatactcctaatcaaagttaaaagtgatcatctgctgctatctgcgacgtcactgacaccatgagagagagagagagagagagagagagagagagagagagagagagagagagagagagagtgttcactgcagaagagtgcaggagcagctaggtaaagtaggcagctatgctcgcccgtgctgtcaacagtcaacagagcggccgtttcgggtgaacatagccccatttgaacggattagattattgtttgcaggccaacaattttctgctactcctatctcaatcaatgtgtttagtaatcgtacactactacagtagctgcatatacttgcatgttgcatccatccgtttctccaatacgaggtggtttttttctgctttgatccaaagagagtggtggctactagctttgctgtgtactgcatggtacagaagtaaggcttgggacgggacggaagtaaggcttggtacagtaatagtttttgaaaccacgtaattatacgatttttacagtgaccgccaaaaacgataaccccaacacaaaagatttgataaacactgcgaggcagcagcgtagcagctgctgctggtgaatgcatgagctgctgcaatggcaatgctgcgtgatcttgcttgggcctgtttagttccaaagttttttttctaaatttttaaattttctcacatcaaacctttcatacacatacaattttttttctacatcttatctagtggagtactctcctagtggagtggtgtactcctacctgcgaaatcaatgggagtacgaatactgggctaagtgcatgcgtgcagtggcaaatgcaaatgcagtgcagtgcagccggttgggttggggcagggtgaccacgaaaaatctgggagtcgcagagtgaccacaaaagatctgtgcgtcatgttccatttgaccgctgagttgatgcgtgtactattcgctcagatttgaggggggtgtttgggcctgtttggtttccaggacttatttcaagtccatgtcatatcggatatttggatactaatttggagtattaaacatacactaattacaaaacacattccatatctttggactaattcacgagacgaatattttgagtctaattatgtcatgattttgacaatgtgatgctacagtaaactttttataattatagattaattaggcttaaaaaattcgtctcgcggattagctcttatttatgaaattagtttttttattagtctgtttaatactccaaattagtgttcaaacatccgatgtgacatgggctaaaaagttttagccccatctaaacacccccttagatggagctaaaacttgttagcccatgtcacatcgcatgtttgacgctaatttagagtattaaacatagactaatatttagatggggctaaaactttttagcccatgtcacatcggatgtttgaacactaatttggagtattaaacatagactaataaaaaaactaatttcataaatgagagctaatccgcgagacgaattttttaagcctaattaatccataattatcaaaagtttactgtagcatcacattgtcaaaatcatggcataattaaactcaaaagattcgtctcgcgaattagtccaagcttatgaaatagattttataattaatatatgtttaatactctaaattagtgtctaaatatccgatgtggctgggacttagaataagtcactgaaaccaaaaatgctggatcactgaactccgccgtactgtgcgactgtgcacacacacctcacttcacgattaatgtccacagctgcttactgctcgaatgctttttttctaaaaaaaatatttgccgtatatacgacgcgacttttgaccgtgacagaaatttcaaaaatatattttcaagtactacatccgttctaaaatatagcaatctagtactggatgggatatatccctttatctagatttatttattagactaggatgtgtcctatcgagtcctacattgctatattttgtaatggagggagtacttcactccccgtttgaagatttttaccgtttaaaatttatcagcatcaaacaatcacaactatcccgtagaaatttctactgtaaaatcagggggagtaacaaattatcacaagacgcatgctacttcctccgtttcaaaaataaattaattttcacccatcccgtatataccaatgtaaaacaaaaaaaaagaataaaagagcaaatacaagtatacaattgcagatttgtagagctagtacaaaaatgctaagcacatgtgaagaaaagattgattagatgatgtgtcaatttttagagttagcaagttgaccatactacttccaatgcaaatatttttttttactttatttaattcaaatatttatatttttataaactctattacaataattatttaaaaataattttattttgagataaagtaaataggaagagtaaaataaaagcttattatcggacggagagtgtagtacagtacggagtatttgtcagtgccagccaaacgcatgctcatgcatggagaggcgtgcgcatgcagcaactcgatcaatcgttcgaccgggaggcaatacacggtggtactccagtagcatagcacatatacgtccaacccagtcacggccacacctccggccggttagctacatgcgccgcgcgtgcaacttgtcgacgaaaaccatgccttgcacgccagaaaatagccagaagaaaccaaacccggtggttgtttaattgctgacttgcttgcttgcttccctgtctctaagacccatttcagtttggaggaatttcaacacacagaaataacaaaaatagagaaatagaaatacatgcccacttctatcaataggaattttttccatgagatttgtagggatggaaatttttgtttgttttctctctacaacttgtaggcaagaaaattttcctttggtttcattatttctaaatcctatgaaccaaatgatattcatagaaaataatccttagaagttaaaatcctttgaaatttgttcaaaacgaattggtcctaagccacgccgctgtcgtcgcctccatccctcgccggcgtgtaaacgccgccaccgccgccgttgattgggatggacggcgaccttttgttcatctggtgacaataggaaatcgatcgatgggtgggagttgattatggatagggccagcgagccatgagcgacgcgagatcgagacctctcttttgttcttgtcaggtggtgactggacccaacatcgtgtgcttgtgtagtggtatcctaccgctacagggaaaagactatgagagcaagtttaatagtacagctaactcccatgcatataaatagttaactataaaaatatactacaccacagatatccggtctcacttcttatacacacatagcgtcttagagtttgtcttgcagccggctataaatccgcagctcactttcttatcttttctcttttcttctcgatatatggttatagctggcttatagcctgctattgtacctgctctaaagaggcccacgtaaatactcctacgacgatacttattccacagtattactccatccgtcttagaatataagaagttttagagttggacacggttattaagaagttatgtataagtgagtgatggagggttgtgattggttgggaagagaatgttggtggagaagttgttatattttgggataaattttgaggtctaaaagtttttatattttgagttcgaaggaacggtttaacgatgacgtgctactgtgcggtaaataattggcgagtcgcgaaggtgtgccattggtgaagagaaaggtaaaagttgccggagtagttgatggagcaatgatgagctctgggccgggtttgtcatgtgatgggccgtgcagtctgttgtctgggcctgccactgcacagtgaacccattttactacttcatcgtttgacaagtcacacggatgaatggatgatcgcattgccggactagtcctgccaatgccctaccttttttcaagcccctgagcgaatgcaattcgtgctcatgagtcatgagtgccacttttactactagtagtaggataggttaacatacaaattctgatacatggcctaggcaggattaccattgatctattaactttcaactgaaatcataagctactaagagcaagttcaaatagtatagcaaactaccagctctaatttatctatagtcaatctaatagcttatttatataatagttacatactacactattaatacctggtcccacatatcatacacacacggcgtcttggagtccgtgctacggctggctacaaatctatagcccactgctcttctctctccttatttatcttcttaaaatatgtttacagctgacttatagcctactattatacctactctaatagcgtagtgatgattaattcctgagctacacatgccacttagttatataactagagatatgcaaccaataccaatcaaagaagtacaaggtagctatttacacccgttaatcaaattcagtcatatataaatcgaacggttagattgtatgcataacaatctattatattgttaaaggaacagaaaaagaagtctccacgttcgctctcatggcctagaaattctcacattaatcggagaaaaagaaaaggcagaatccatatagaaatacaatttaaaaatagctgaaattcagaattaaaaaataaggaatattagaagaggagactagagtctatatagaaatacaatttagaaatagttgaaattcggaattaaaaaataaggaatattagaagaggagactagagtccatatagaaatacaattaggaaataactgaaattcggaattaaaaataaggaatattagaagtagagtatagagtccatatagaaatacaattaggaaataatagaaattcggaattaaaaataagaaatattagaagtagagtatagagtctgtatagaaatacaattaagaaaaaaaaatagaaattcagaatttaaaaaaataaggaatattagaagtagagtatagaatccatataggaatttaaaactaactaaaattcagaataaacataataaaattaaaagtagagtttagagttcgtataaaaatataatttacaaataactaaatttcaaaattaagaaaaatatgggacgaagagtttaaagtcaatataggaatacaatttagaagtaactgaaatttgaaattaaaaattaaaaaatattgaaagatgagtttagagtccaaatagaaatacaattataaataataaaaattcagaattcaaaaaaaataaatattaaaagacgagtctagagtccatataggaatatatataatttataaataactaaaatttgatattaaaaataattaataactaacatgtatataaaatacaatatgaatattacacattagtagtttcgtaaagttatagcaaaatttaaaattatgttgtcattttaatatatttgaataatataatgagagaatatatatgctattatatgagagaaaatataatgatgctagccgcgcaatattgcgtgggccaccatgctagttttattaattccttccaggtagctgtcaaaggagtagtgtgtagtgtcgtgtggaattcgcgaggatgtgcatgaacttgccaaggcagggatgcagttgcgtgacaaggacacacgtgaaatgtagcgagagaagagtcgtagtagcgggcgcgaccgcgggagtgtatacggagagatgaagcgagctctctccaccaagcaaatcgcgagccaaaccaagaagacatccacatgacgacgcctcgcgccaccaccaccacgtcgcccttctcctctctcctcctcctcccgatctccccctccgccgcgactcctccgcgccgcgccaggacgccgccgccggcggtggcacatggcggcgtgcggtggacggctggcgggaggcggcgacggcgagggtgccgggcggcggcggcggtggtcgaggacggcgtgcttctccccaaagaacaggaggacgacgcgtcggcggcgagatacgactggagggaggagtggtacccgctgtacctcgccaaggaggtgcccgacgacgccgcgctgccgctcacggtgttcgaccggcagctggtgctgtaccgcgacgccgccggcgtgctccgctgccacgaggatcggtgcccgcacaggctagccaagctatccgagggccagctcgtggatggcaagctggagtgcctgtaccacgggtggcagttcgacggcgagggcaagtgcgtcaagatcccgcagctccccgacggcgccaagatcccgcgcaacgcgtgcgcgcgcagctacgaggtgcgggactcgcagggcgtggtgtgggcgtggatgtcggggaccaacccgccggacgagcggaagctgccgtggttcgagccgtacgcgcggccggggttcaccgacctgtccacggtgcacgagctcccctacgaccactccatcctcctcgagaacctcatggatcccgcgcacgtccccatctcccacgaccgcaccgactggacggcgaagcgggaggacgcgcagccgctcttcttcgaggtcaccgagcggacgccgcgcgggttcgccggatactgggggaagcaaaggacgccacaccttcgcaacctgctccggttcgaggcgccgtgcgtgcttaccaacacgctggagttcgtcgacaaggacggcaaggagcagtgcttctcggcgcacttcctctgccgccccgcggggcaggggaagtcgatgctgctcgttcggttcggatccacccagacgtcgccgctggtgaaggtgctcccgaggtggtacttccaccagaacgcgtgcaaggtgttcgagcaggacatggggttcctgtcgtcgcagaacgaggtgctgctccgggagaaggtgccgaccaaggagctctacctcaacctccggtcgtcggacacgtgggtggcggagtaccggaggtggatggacagggcggggcacggcatgccgtactacttcgggcacagcacgctgtcgccgccgccggtgccggccgttgtcgagcaggcgccggcgggggcggtcgccgggatgtccgcgtcgttcccggccaagggcggcgtcggcgccacgcacgcgcccaacccgaccaacaggtacttccgccatgtcgtgcactgcaaggggtgcagggacagcgtcaagaggtacgcctcgctcaagaacgccttcgccgcgctcgccgcggcggcggtggcggcggccatcctggcggcgaccaggcaattgaaggccgtcctgctggcgtccgcggccgcgctcgccgcggcgtcgtacgcgtgtaactgggtgctgtctctcatcacgaccaattttattaggacacacaggagactgtaaccgtggcaatggctgtcatgctttggcacatactaatagcaaggtagaatggtacagctatttcattatttttgcccttgtatatttgtatcactacatgagtaaacgacgtttagttatcgatagttttgttatgagtgatgaatgatctgcatcgtactgccaatgccttgcattctcaaatggttgcacacttgcactcatacaaagttagtacactccatcatattataaattacttttttttcaagttaaatttcctgaaagtttgataaaatttatagaaaaaatataacgacgcttataacactaaattaatttcattacatctaacattaaacatattttgatttttttttgttttgtgttaaatatattactatgtttttctataaacttgattaaacatataaaagtttaacttcaaaaaaaagttaaaatgacttgtaatataaaacgtaggcagtacaatgcgaatgtagggtactccatccagctgaggtaaaccaactccaatatatatacaaacacaaacaacgtacccaatttttactgttaaaatacaggcacaatgcctggtatcacacgttattaagtagacagactcgataaccatgacacggacagggacttcttgccactggtttacgcacggttaatattacagaccacacatagagagacggcttagctatttgcaaataagcttgacaagatagatgatgctccaaaaggatgcgatctcagcagttgagtacttacgctggttcatctagaattccctatcggggaagaggagtggggcgacaagggaccaaatgtacagacctgccgttgcccactgggttgcaatcctgacccaaacggatggccacccaacgtcaacaagctttccactctcaccaactgaggttgaccagccagtcaagagcatcgcggagtacatgcttgccaaggagaagatgaggtggaagaacgagtaggagtatgtcactggccttggcacatccttcttttccgcttcctcatctgccttactgaaaggaagcagtggcttgtcggcacctgaaaaagggcaatgtgataagcaacacaccttgcaaatatggaacattgatttagtagatagagcacgcaatctaaccagcacgtggtgagtctggggctgagagcacagttgcagatgagccagcacggacagccgaatagaccacagaaaggatggtggttagcaatcccagcgaaaggctaccagtcgacacagctttggaatggttgtgcagtccattgcattcataatccctcggctcacttgaaagtccactgtagcacaaataggtgcagtagagggcgataactgatgctggcagcaagctaccattgatctgcaaaattcataaaaaggaaccattcattattattacaagcgagtaaccatatttaagatgagatgctagcagctagagcttgtgggtgtaacagctataatttgataaaatgctagaaatcttacacaacaattatcataatgctacaatcttatgcagcaattatcataatacacggacacatttctgacagcttttcgtggtcaaactatggactaatgaactaaatactctatacacagaggctgtgttactatattataaggataacagaacagaccagaagaataatacctttgggtgcagggcgacaatagcaaaaacaaaaacaagaatcagtgtgaagacaatgaagaacagattgattccgcagtcatgtccagatggagtgaaccagtgaaagagcagacccgagaaagagaatgtgacaatgtaacagacaactgagacaaccaatagagccatgtacctgcagtaataaatatgaacaaattattaacaggttttgataaacagaagaagttcatactaaattaaggggacctgaaggtaaacaaggaaaagatcagctactaaccagaactgttcatccttggcaacccaattctcgttccatccatgaacaaagtccaacaaaagaacaacctgaacaagcaggaacagtccagatccaaacttggatattgattctgcaaaaacaaatgacagttaaaattaacaacctggaatggggagaactggctccaattacagtaacaaaaactgataatatagaattagcatataaaactattcaagaagcagcagagtgtatcatcaatcacaaaagtacaagcaacaagttcatccaacaagctgctaagacagtgtcacgtttaccatatatatcaaccaatcaccaataccaagcttggtactcatgtttttaattaccaaataaacaataattgatgatgtatcatcaagccccaaaactggagcaaatattaatactatgcagttagtacacttccatgcctactcacaaccacatggagatccaaaggaccaacggaattatacattaatagttaaaaacacaggcaaccacaaatgcaacaatgtcactcccaactttccaacacaatttcatcctctatatcaaaatactcaaccacaagaacacatgcctcttgaaacattaggaattactacaatttgttcagctaaaatcgcctccaaagttgcaaaacttaagtcttcttcttgataacgacgaatccacacacccacctaatgttttgcagattagttggttcataatttcatatttacaattttatgatccctatatgaaaatatgtcaaccttaaagcttgtatattctttggtttagaaagtgtatcagaccaataggaatctccttgttcaaaaaggttctagcgcagagaatcaaaagttaagacaaccctaaggaaactcctcacaactcccattcgcaccttctctttcactctagcagtgttgaggaaggacttacaaggaaccttttgccactcctatctttaattctctaatagcctatcacatacagatatactgattttaaatattagtgcaaccatctcccaatataatgtcactgcagcatctctataattgtgtttcagaacgattcaattcgtcgtatacacagctacataggtgaaagggggggcattaccgtagaagcttacgacgccgttgggcacgaagaacatgaggaagacgatgacaacccagcagaatatcttggccatccatccgccatggtgtatcttgtcgcgggggtccttctggtccttgatgccagccatgatgatggcgaggatggtgaagaagacgaagttgccgaggctaaccctaagcacggcatcggtctcgaaccactcgcggtcgggcgtcttgtggaagtggttaatccctgcacagatagccgcaagaggcgcgccatgagaaattccgatcgatttcgagagaaaaaaaaagaaccaaatcgaatcacccggaagggattgcgaaggcgctcacatgggatggattggaggaggggcgcggcgacctcgcggagcgcccaggaggcgaagagggagagcgcgaagaggccgcagtaggcgatgcgggcggagcggcggccgatgctgccgaccgccgtacggcacgcctcgcacgcgcacgcggcgcagcacgacgccaggcaagacgccgcccacatggctgctgctcgtcgtcctcctcctcctcctcccttgcggcggcgcggtcagatcgaatcgatcggtgggtgaaggagctcgacgatggctttggcttgttcggatttggggatttcgccgcctctcgggggaagaagctttggtggggatggggaacgcgtgcggcggaggggcacggaagagaagaggaaaggaagccgatccggttttttttcccttttcttgttttttttttccgttacggagtgggtggctaccgggccggttgggttggaccggaccagcccgggccgatcaggagaccgagtcagtcaactactgtattattccagccttctacgtccattacatcaggtcaagcaaaagtaacaggatataggttccgtttactacttccgtcaaaaaaaaaactaatataattgaagatatgacataatttagttcatcatactacattgagcctgttcggtagttctaatttacagccagccactacaatgaaatatagagaacaatcgtagcagctgcagctgttgcggctgcacagccgctgtatagggctgccgaacaggcccattgtgtttcatgtacagctaggttaggttttttggatggaggaagtaagatgaaacaaggatgaaataaaatgagttatctacttacttaacatgattaatttatattttgagaagtaaatttaacaaaatagctagaaacaagtgatctatgtaatgtaatgcagattttttaaaaaaagatcgtatttctagaagcatggagcatgatcaattgtatctgatcatcactttcgaacgggaccataataacacacacatcatcgtcagcttctggcagaataggtaccaaaatgacaatagggagcataagtttgtgagttcagaactcgaaacaatatggtcctgaacttctggcggacaaactagatatcacatcctatattttccctacaacagagctcctaaaacattacagccacagatcacactgtataaggcatgaaagaacaagcaatctgaagtcgcatgccacgacaaccttcaggtatcaaaatggatattgattgactggcagatgctaattgatactgcatcgaaaattgacattagaattttaaccatttcttctctttctcctttctagcaaccgcgttggttgccgaagcatgcgttgcttcagcatcagctagagcttttcgggtttgtttcaatttctttgaagctgcttcgtagaatgccttgtccttgcggtttcgcttcatcatttcctccagcttctcaacacggctcctcagttctttcacttcgtcatcgtatgcaagcaaggatcttctgtcttccttcttggcatgtccatttgcctcaccggatgaatcctttttagatttcacggctgagccttctgcaacatcttgacccactagttggctattgataaagctgaagacagacctctcttcttcttcagctttagcagcccttgcctgttcagcaaacttcttctcacgctttcttttcccaccccgactgcgtttttttccagggcctacactatcattaacctcacttgcagccacagcgtgatcaagagattgctttgggggtagtaccttaactgggattggatcaagcatgccttgtccagaaacacctagacccattccctctcggtaccccatttttgccatcattttggaggcaacgcccctggtatggtgctcccactttgcaaagatcgcagtctctgtctgaacaccacttaaatttttggattccaaaaggcctagaccctgatgaacagattcatcctcttgatctccatcctcactaaaatcagatccttcatcacttgagcttccttcaccatcttcatcgctctcatcagcatattctgagattgaaagagaatcactgggaagccttgcagagctcccgtcatcttgaaaaacaacctggccaactttcagatcgtcatcccatgactcaagttcagctcgtctccaaaggccagaatgatgcccagaagcagccagtatgctggatcctaccaaggactgctgccatctagtcggagtgaattgcttcagggacagaataggaattacaatacctgaggataatttttggattagtcacacatgatactttatgtgcaaggggcagaaccaactgggacatcttatatgtgtaggaaaacacaaagatataaatccatgaaaatcaatacaatattcacaaaaaatgcaacatctgaaggagcaatccatcatatgaagttcacaccattttgtggtgtcatcattgcttcaggtgaaaggcaacggaacaagagatcaatggtttgaaggggtttaatccttagaagggtgcaaaataagcatttacataccatgggacaagcggcagttactaccaaaccgacatcgttgctggagaaaaaacttgcacatctgcactatgggcagattgattagttaatttgttggtaacaatgaaccttatgttctggacattacattccattaaccaacagaaaatatggttgatggtgaagggtacccacctgtgacctgttaacattttccccgtcccatttattcatgaatttactgtggtggtgcgatgcaagaggatagagggacacactcaggctttgctacaaggtttatttgggagcagatggacgtatggcttcattgcaaaataaaggactggtatatgcacaatgcacacatggttttaatgaaaagcaaatcatgtactgtcacattactttggagagaagttcagcaactgctcacacagaatagcctagaatcaatacagaaataacttgattatacaaccgctagaatgctgtatagctctgcagcccagcaaggacttgtattgcaaaagtaggaatttgtttcctaaagttattccgtcattccaaggacattcaacaaaataattgcacaggtcatatctcctatgtgctggagttataatatctcatgaaggagagaagttggaaaaacagtaaatactggcaaataaacacccatttcctaccggcggtaacatagcaagttacaaacataccagcacgtagagggttatgtttagggtttaccaggaaacatggagctactattcaaaggaaaaaataatggaaaaacgatagatcaagtggcgtgactcaccgacatgttttcagacgtaggagtcagaaatgagatccttgcatcacttgagccttcaagtcctataacacatccattataccagcgcccatccttatgcctgaatctacacttagatccaactgaaaattcctgtggctccaatggttctggctcaacatcatcgggtggatcaacagctacttcaggtgcttcagatgttggctcttggttaggaaatatctcatcaatttgctttactagtctagagcgtttcaaatggagaagtccctcctctgcatccttaattgcagcaagaagttcttcatggaccttcaaaacagtacatattgtaagttagcatttgcacaatagaagcatgaaatacataagtacagaactattgaagacaatggtataagggttgagattccccaaaaagaagctgactgctttctctgaatatttgttcgatatttttctctggagatattttggacaaggaaacctactatttggatattcacatctcaggaatccaaaatgcataagctaatcatctcacctacaggttacatcagtgagctatgatgtgaatatcactcaactcttgtcataccaaacttaaacatgttgagtcgatatctaatctaaacatactaaatactaatgtacaaaagttaccatccatcttcggctgattttgccaatgacatgatacatgagtcaactaaatctaaccctgtcaaaaatatccatggacaaatcacataataaaaacgtcatctcgacaaaatgcgcttgattttcttacagtgaccgaatcagacatatcaatcacaatccctccaagcactcttgttagttttattaggcaatccttattacattgtagagctcactactagtaataacaggagacatactgcctgaacccagcatctacacgagagagataagaacaataatccgagcacgacccagtcacacaaccagtcctgcaaattctaacattccgagaggactgcccgtcgcatccccacaacttgggagtcaaattaggagcctagggctagccaaaccttcaacagccagcgcccgcgcgggacgatttgagattgagagctagttaaggcgaggcgaggtgacgcggatgcgtacctcgaggaggtcggcgttggaggggtcggcggcgagggcctcgtcgacggcggtgagggaggcccgctgctcctgtaggtggtgctccagctgcagctcgatcgacgccgcctcgtcctccccttcttcccccgccatgggtggtggtggatcgagagagagagagagaggacgcctcccgctccccctcttcttcttcttcctccgatgcgacggccagcgagccagcggctgctctgctgcgacctgtgcgagaggtgaggtcggtgctgtgtcgcgatggtgtgggcatgggccgtggaagatgaacttgttttctgggctttgagattgagctggcacgtcgtgggcctcgtaatatttttcttgagattttatttttaaaaaaatatcaaaattatatgttttaaagaagaaagaaattaagtttcaacttaagatcatcgggttaacaagtgacctgtcagccacacctcgattgagatattctatattttttatacgattacaaagcagacgctcataaacacacagcactacacacgtaagatcgctctcacaccccctaatgcacgtagacggaaatgaaatactacattcacactccctaatacacgatctaaagaggcggaactagtggcacatccctaatctcagtaaaatcttgttaaaagcccactacatatgtgtaatatttataaacattaaaatttgaacctggtgaatgaaagcatgcacatataactctaccaccacactactaatactttcctatatattttgtatacctctatagtgaacacgattttgcatatatcgtgctacgatgtagttttatccgtttctatgtaagatgactggattgtcgaagaacaaaggggttgtttggttcgatgccgttggtagccagccaggttgtggcgctgccacaattttatggcgaaggaaaggctcgccgcacttgtggcgaaaactatcacataaatgaaatgtaacgtggtgtggctgcctcaacttacgtgggaaccaaacaatagcctattttgcgtggctaccgcattaaaggcttggcgaagtctggcggggaaccaaacagccccaaaatgtctcagataccaagcgaagtctcagattacgaattatccaaagggcaaaagacatgcaaaaataataatatcataatattgtactactcaataaccaacaaaacataccaattttatagtatccgcaaaaataaaagccctagttagaaaacaatttcaccgtgtgcgtatcactcatagtgttttattatgcaattttctcacatggatgcacgtggttttcaagaggcgcctacaaatcgagcgttcgatttttgtttgaaaaaatcgggtgatgttccaacaagtagatcagaagtttttcactaagttgatcgaacatgttttaatcgttttaaaagttgaaacacaaccaacccaccttctaaaacattttgctacaacataggaaataacaatttttaagctatttcaccatatataaaaataatattttagcaaacagagaaatgatgtttcaattcactgcaacatttgatttatacatagtgacatgaatatacttgctgaaacattattggtggaagaaaaaataaaacggattctcttaatagagcatttccataatatatgggtgatttattgcaacggtgcgtgtggtggagcgcatagtgaggacgacgtggatgcttttttgggcgaggcgcgatgggaggagcgggcgcctgatgcatgcatgcccgtatcggatgcccgatataaaaaaatttcgtggttttcatcttgattttcttgtaacttgtgttaattagtccgatataagaacaataaatatatttttttatcagataatctgcccagtgtcacttgtggttttcattttaccagaggagcaacctccaccgtctgatcttgcaacttccgtccagccacgctgcatagacggtccagatcgaacccgaaaccatcatcccagttgctggcccaccctccagtctctcacggaaaggatccgacccgttaccaccacccgcagcactatccaaatgcttacaacaaaatccgaccctcgaactctcccacactccattctctgagatctgcgacctccccatctcccccaactccggcgatcgccggagttccccgcgacggcggcgcgatggacctcctcatcgcgcagatcaacaccgacctccgctcgtcggacgcgctgcggcagtcgtccgcgctcctgcaggcgctgcagcagtgcgccgccggccgcgacgtctccgcgctcgcccgcaccgtcgccaccgagatcctgtcggcgccctcctccgccgtgtgcaagcgcctcgcgctcgacctcctgcgcgcgctgccgctgccccccgacctcctcgacccgctcctcctctcctccctccgctccgacctctccttccccgaccccgacgtcgccgcctcctccattgcctcgttcccctcgctcccttcccaccttctcccctccctcctctcctccgcccacgccgacatcgccgccgctctctcgtcgtccgccgagtcactccgtctcgccgccgtcacctcgttatcctctctcctcccgcgtgatgacctcgcgctcatgtgctccactaatccctcgctcatggggcacgctaccacttggtgggggcggctggcggagcttgcattggaccctgcggatgctgtggctgccacagcgtttgaggcgcttgctcggctcttccaggagctggatgcccggcggatgagccggcttgccggggacaagcttgttgatggagagggcgcgcttgccgtgcgtgctcagtgggcagctgaagccatcaatttcatttggtcccggcgaaacatgctcattgcacgctccatggttatgccagtagagcgcttccgggtcaccgtgtaccctattgtgcacgcagcgaaaatggttgcttctggcatggtgaacacattgcggcagattgccaagccaggggacactacaatagatgacagtgtggagtcgagcgcggagaagctggttggggtgtcggatatcatctcgcacttgctgcctttcctcagctcactggatccaccattggttttcgaggtggggataaatatgttggcacttgcagatgtgcctggaggcaagccggagtgggcttcagctgccactactgcaattttgacactttgggaccggcaagagttctcatcgatgagggaaaccattgtcagagccgtcgtgactaatctccatttactcgatcttggaatgcaggtctgaatcaatctcctcatagcaacttactttagcctagtcaatctgatgattacttttagttatttctataatatactaagtaaaaatttagatcaaccttcaataccaactgtatgactataaggatcatggaagtgggtatatgggttcttagtgttcactggcagctgtagagggcaattttcggtcaatttgaatatttacaatcatcaactgtagatgatcttgttcaaatatagcttcctttcaatcattcaatgacatcaaggtttcgtttgaatttatgtctttaaactcattccaatataacatgtaattttaaccagctagtgtttattatgagtgcaccatgaaaccaaacaggtttgggatgctatccacaccatctaaactatttcattagagttgccagcagtgaaccaaatggcaccttagttggttcggaattccatctcctgattgctgccattcaactcaacaattatttgatttctcacgatattagttgccactatattccctagcattaaccggcgatctgtgttacatgcatataataacatggatttacaaaagtatgttttgtgatgcaggtgtctctgttcaaaaggctgcttcaaatggtgaggaatttgagagcagaatcagatcgtatgcatgcattggcatgtatttgtcggactgctctttgtgttgatctttttgcaaaagagagtgttagaagaggtcagaagcctgttccaggaacagatgtgatctcactatttgaggatgcaaatgtgaagggtgatctaaacagcataacgagcaagagcttgttcagagaggagctagtcgcttccctagtcgaaagttgtttccagctatcactccccctacctgagcagaagaattctggcacagagagcagagttataggagcattagcttatggaactggatatggtgcattgaattggacagaacctgctttggatgtggtggaagtttgcaggccttgtgttctttgggactgtggtgggcgtacctatgcaattgattgctatctgaagttgcttgtacggctttgccatatatatgatactagaggtggtgtaaagacaatcaaagctggtgcatctcaagatcagattctaaatgagacaaggcttagaaatttgcagctacagcttatcaaggatcttcgtgaggttatgctcttagttaatcttaacttttaaaatctaaacacgatggcatgtttgttttacatgaacccacatagttctttatatttgttgaatgttgatgcttcgttcatccaccaaataaataaaacagtggtttatctattttatactatctttatggcaacccattagtttttctctgttgcactgaactcctatataatattacagtacatgattttgtttcttggcatgcatcattgttatgcttgtccttgtcttttccggcctcatggatctgactattgcaaaaacttgtgctctaaagtacatttcccataaacttctctcgttcaataactaaaaagcatacactttgacaaggctttactttagtttagattatattatggctgtctttgctgggctttccttttgctcttcttccccctttcttttttcaaatatttataaactagaactgcatcatctgtaaaagattcttttcctagttggtaataatcataaagtgccgatgttgacatgacttctactctatattctacttttattgcaggttcatacaccaagaatttcaggacgattgatatgggcaatttctgaacattttgatcttgaaggtctggatcctcttttagctgatgacccagaggatccattgaatatcatcatatctaacatgcataagattctattcaagatcgattcatctacaactacctcaagtaggatacaagatgtgcagtctgtcctcatatgcgctcaacgtttgggatcgagaaatgcaagagcaggccagctcctcactaaagaattggaggagttcagggcaagtacttcagctgattctgtcaccaagcatcagtcgcgttatgtcttgcaaataataaaatatctaacgaaccatcctgataacaggtgagtgtattctgaaactcgagtaactaattctttcacaaagggtcaccatttatttagatatatactgtcataaatgttgtacaacagagaaaaaaatctctactggaacatgcattaggaaattatgaaatgtctaactttccaatatttattcaggtgggttggtgtaggtgatgctacaggggattatccatttagccaccacaaacttactgttcagtttttagaggcatctgcagcacaagataggaaattggaaggattagttcacaaggccatcgaagagctttggaggccaaatcccactcagttgactctcctacaaatgaaggggattggtgctttgcacaaagagcttccaaaaacactttctttgactggcagcagtgatccatgctatattgaggcatatcatctggcagatccaactgatgggagaatcaccttacatctaaaggtatggcctgatcgatgcatctttcccttgtttgcttaacagtatattcattttattgtacttttctgttttggtctctgttaaatgctgtttagggacaatttagctcttaacgtggagatagttatcttggggggctggggtaaaattgccagcagttttttgccaacactgtaaatactatattattaaaaaataggaaccaatattcttatgcaacctattggccacagttttctcattttaaggccatattatgtgtggccttatcatgatggatcttcagtgttagctccagcactgtgcaattgtatttttgtatttgttacctggtagcaggtaggttgattttagaagttaaaacaaccatgtgtggttccacatatatttcttttctctgaactatagaattttttgacctggaattgtattatcatgttgtttgactagtttatgttgttgcagattttaaatttgactgagctggaactccacagggttgatatcagagttggtctctctggagcactgtattatatggatggattctcccgcacagttcggcacctacgtaatcttgtttcccaggtgcttatactaatctaaatgtgcctattttgctgatgttcttagtataaactatacaattacccatcaataatttaaaactagtgtagtgccccttgtgttgctagggatctgaaatatataacatcaccataaattctgaacttaaacaaattaaaataattatcctcgagtataaaatttcacacgcataattcacatattagatcaaccaactcttattttaatccaccttatgtggaaaatgcctttccattctgcaggatccagtccaaagtagtgtaactgttggagtttcgcactttgagagatgctccctctgggttcaagtcttgtattacccattttatggaagtggagggtctgcagactatgaaggagattatgcagaggaggactcacaaacagttaggcagaaacgctcacttaggccggagcttggtgagccagttgttttgcggtgccagccctacaagatcccccttgctgaacttctcttgccatatgagtgctccccagttgagtatttccggctatggccaagcttgccagccatggtggagtgcactggcacatacacatatgaaggtagtggtttcaaggccactgctgctcagcagtacgacagctctcctttcctcagtgggttgaagtcgatttcttctaagcccttccatcaagtctgctctcatttcatccgaacagtagccgggttccaggtaagcattttgaataatctgtgtcacttgagtcatgttaccatcctctttattctttcatatacataactatcaaaattcttgggttataactcatttgatctcctacagttatgttatgccgcgaagacatggtttggtgggtttgtgggcatgatgatctttggcgcaagcgaggtcagccggaatgttgatcttggcgatgacacggccacaatgatctgcaaattcgtcgtgcgtgcctccgatgaatccatcacaagagagatccaatcagacctccagggctggctggatgacatcaccgacggcgccgtggaatacatgccggaggaagaggtgaagagcgcggcggctgagcggctgaaggtttccatggagagaatagccctgctcaaggcggccaagccgaaggtgccaccggcgaaaaccaaggaagaagaggaagaggagaagaaggagcaagaggacctggacgagtttgggaaccccaagggcccctcgacgctttccaagctgacggcggaggaggccgagcaccgtgcgctccaggccgccgtgctgcaggagtggcaccagctgtgcaaggagaaagccttgaaagcacagtgaggcttttggttttatgttgtgattttgagtgccatttttgttcttttaacccccattttgtgtatgtattagccctgctgattaatttcactccatgtactactgccgatttgttcattgtattcattgttcacagataacatttgtaacatagatccaagctttggtgtgaaaatacatttttttccccggtgaccacactatattcctggtccatttttcgacgaaaatctacaaagaaggtgtgcataacataattcctaatgtttgactgacaggtggggtctggtgaattctacctgtctattccaatgacatgtggggtctcttgcaatggccccacaagccagtctctctcttcgcggtctgcgtgttcccacccctccaccctcgagtcccccgaccaggcgatcaccccgtgggcggcggcgccgccgtcctcaggccgccggccgccgcgtgcggtcgagctgccttgccatggcaaggccgcagccttgctgatagcgaacggaggaaaacgaccaggctgtatgcccgcatggtgttcgaaggggtcgggagcgatggctcggggtcgggggcggtggctgctgccgacgcggctgctgaacgtctgcctcgccgcgctctgccgcggggggagcctcgccgccgcggaatccgtcctcgtcgacgccatccgcctcggcctgccacccgacgtcgtcacctacaacaccctcctcgccgcccactgccgcgccgcgggcctcgaggctggcctcgtcgtcatgggacggatgcgggaggccggggtggagcccgacgccgtcacctacaactccctcatcgcgggggccgcgcgccgcgggctcccgatacacgccctcgacctgttcgacgaaatgctccgttcggggatcgcccccgactcctggagttacaaccccctcatgcactgcctgttccggtccggccacccggaggatgcctaccgggtgtttgctgatatggctgagaaaggcattgcgccgtgcgacaccacctacaacactctcctcgacgggatgttcagggccggttatgcgatgaacgcatacaggatgttcaggtacctgcagagggcggggctccccgtgagcattgtgacttacaacaccatgattaacgggctgtgcagttcaggcaaggtgggctatgcccggatggtccttagggagcttgggaggactgatcatgccccaaatattatcacttacacggcagttatgaaatgctgctttaagtatggtaggtttgagcaggggttggacaccttcttgtcattgctggacagagggtacatttcggatgtctacccttactgcacagtgatcagtgctttggttaagaagggccggttgggagaagctaataattattgtgacctcatgctacaaaatggatctaggcttgacagtgtgtgctacaacacgctgattcacatgcgatgccaagaagggaagctggatgacgcatttgagcttgtgagcatgatggaagatggcggcctggagagtgatgagtacacattcgcaattttggtcaacgggctgtgcaagatgggacatatcgaggctgcagaaaagcagctattttacatggagatcaagggcatgcaatctaatgttgtggcatacaattgcttggttgatgcgctctgcaaatttcaagaggtggatgcagctatcagattactgcagtgtatgaaactaaaggatgattttacttacacatcactagtccatggtctatgtagggtgggtagataccatatggcatcaaaattcttgcgaatctgcttgcatgaaggtaataatgttcttgcatctgcaaagcgtgctgtcattgctgggcttcgtagctcagggtttaaaaatgatttgaggaaagtccgggtagcattaaatatggctaagctgttacgaccataatccaaggaaaatggcctgaaagatcaattcgcaagagaaatgactggataatcctgcatggagtttaaggatgaatatcttgtcggtggctcagtgcatcattctatagaagtaaaatgggtatactctttttctggagaaactgtaggatggtgatcttgcaatatgcaatcagccttttcactgtcagtctgtcaaacccaagcggaacaaaattaaacatcatgggaagctgcagacatcaccactagttggcgaacggtatcggctcagtatgtgcacaaagccaccactaactggtgtatgccttgccttggattttgttgggaaggtaattgtggatttatattttatattcaagtcttctgcttaaattagttattaccttatcgttgtgtcacagtaaatcatgctaagtttaccctcttttgggtggttgttgcagattgattgggtttagttatctgttgctccagaccagacgatacagagcaagcaattaaaaagaagtacaaaaagctgcagattggtacagaaaaacccatttgtacatcatttttttgtctgttctttaattcttatgaagcagtggaaaaaaaaatctctttgggtgataccatatgtcacagttttaacatattgagcaagttttatattccaatgaaaaacatagcaagaggacagatatgtttgtggtatgcggcagtgctacctatccttgaaattttccattggacagccatttgttggagctctgcatgtcagtggctgctgagttcgagccgtcaattgaaacaagtcggcaacctcttcgtgatggagcatcgtagattggtttgcaaggtgacatgaattttttgaactcaattgaggtcaggtttgctttgggttgaagaattggggtgatttgggtagatcaggagatgtttggttgattggattggttctgggacgtatagtttgctaacataggtgggtctggaaacagtctagttttttaggcattagcaggtctagtccaaatatgaagttattgtgacattctaccaattcttttccctacctttgaaggacatcttgagtgggataactttaatttacagaacatggtaaatttaggttcaagatggatttacaaaagtattttctgtgacccagggagtcttcatacgactgcttcgagtggcaagaaacttgagagcagaacaagatcaaatccatgcattggcatgtactccatttgtaggaatgcttttttttttgccgattcatactttggaagcccattcgaggaacaggtgtgatatcacctttgaggatgcaggtgtgatgatacaagctgaaaaccactactgacgagcggccgaagatttacatggagaacgtagctcaaggcagcaaaactgaaggaacctttgatagcgacaagaggagaataatgagcggagagagtccaatttcatgtgtaattctttcgacatgaattttgcaaaaggagtccaatttggctttgatttgggagaaacgaattcgtacattcggaactacgcgaacatgcatgtcagatgaaggcggggccgtcctttctgttaacagacagtaaatttcaagatgtcaaatatacgagtttcaacacaaatcctacagagtttctgctacaggaaagtgattttcaccgttgtacagagtttctgctacggcattggtatattctatccttttttaaaaaaaattaattaaaaattgatactagcaacctactccagtcctgatccgagtttgtgtctaatccagtagtattgttatattttggatcgaaaaagagtagattttctgaatatagcttattttcagctggtatcttatccatacagaccaccaaattatcaaaatcttcggaatctgaaaaaaccccaacccaaacaaagcatctcgtgtccctatctttcgggtcatttgaaactggagcgaataacctctcgactccaatttccacacaacccaccaaaaagtctccgccacttcaccccgatcgccgccgccgccgccgccgctcgattccccgatggccgcggagccggaggagcgcctcgacgtcctcaccgccggcggcgagaagacaggcgcctccaaggccaggcacgccgcagctaccccctacccagcttactcccgccgccgcttcggttggattccattcgatcggatcgcgtgactccgccgccgcggtttgctcggttttttttttcattgcaggtcggaggtgcacagggacggcgactaccaccgggcggtgcacgtgtggatctacagcgagagcaccggggagctgctgctgcagcgccgcgcggactgcaaggacacgtggcccggccagtgggacatctccagcgccggccacatctccgccggcgactcctctctctcctccgcgcagtgagctcgctaccccttgctcccttgatagaatttcggaatgcgattatctgaattctgcttggggaatcgtagtggcgattttgcctagcagcgtggagaagcacttgtcactctgctttaagtttactatgcacatgggcatgacactcattgcttatatctgcgggagttgtagtctctgagatattgcggttcatctgatcgatgcaactgctgaaacttgattgaattaacttacgtgatgaatgggttgcacacgtgctattatcacatagtgtttgagacgctgttcatattttattttagtttattccacaggttcactgacttgcttgcatttgttgggttggctattactctattgcgtgattctttgctaggctaggtaaaaagggtaatattaaaatgatgcattctaattggtaatagcatttgacatggatcatcaggcgggagctcgatgaagaactaggcatcaaacttccatctgatgctttcgagctgttatttgtttttcttcaggaatggttagtacctctatctcttagtccatcatcttattgtgagtttgcaaactacgatagaaaacgattacttttatcttttttgaccgggtattaaatactattctatccctcatcagtttaagattgtatagcagcatattctgatcataactgcagcggatcttttacaatttcaaacagtacttactgagaggcttgctaagtgctaatatttcatatttcatcactttatgttcacatgaaatttcacactatcagtatctgcataaagggacgttatataatgttatcctctgattctttgctgcagtgttatcaacaatggcacatacaccaacaatgagtacaatgatgtttatcttgtgactactttaactccaattccacttgaggcattcactctccaagtgaggatacaatgattagtaatactttgcattatgtttttttcacttgctcttgcatattcatggttgtcaacatcaacaagtgtgtattacaagaaaaatctgtacttatgttcctggcaccaaaggaaatatatctgagcaagtaaatttatcaacatgacaaaaggaacactatcagaattgtccagtatataaatatttatgatgtaatttctttgttttactagttgtatggtttgtttcataatcaactgtagaagttttaattataggaaagtgaagtatctgcggttaggtatatgcatcttgacgagtacaagagctgccttgcaaaagaaagcggagaatatgtgccttacgatgtgaatgggacatatggccaactatttagtattattgaagaaaggtaagcatccaaattatttgtccagtcatgtttttgtcaatttgtggcctcgattgtcgaagggataattatattcactttggaagaactgaaatgacttttttctgtgatcgatatgaaatttactactaccaacagtctgtggtaacaaaggtgctggtgacaattaaaccatgtccaagctctcatttgacctccaggtttaggtttaaacattgggaagctggagtgagtatttgtctctaggttgacacagtaggttcttaggagttaggatttattgtatagttttttttttaactcatcagagttttaagttgaaaaaaaggatgtggtgtcattgagcaagtcattcgatgggtaagtctctaaacaaaaacttagcatttggtgaatcagggacttttactgtatgttttgagcagcatctgctcctgttaacaacccaccagaattagaactttcaaataactgtttctttgtcttcatctcttgccagttaccactttgaagcaattcaacatatcattcccttggcaatccctgttgcaccacgttttttgtcaaaattatcttgcttcaacctttcatgccatgtttataggtacaaagacaatatcgaatcccgcagtttaaccttgcaaaagcaaatcaaccgttatgctcccatccatttggaaccagaggtaagctgtctatattttttgtcagtcaccctgtagctctggttatttattttccatttcatatttgattatttatgtaactattcttgcctatttggcagccaccaatattcaataccaacaaaattatatgtatgggaaaagggaaacattcacttcatttatgcacatagctactaggtatgccatatgcaatatgcattggatgtatagcacatgaaagctaggtgcgcattgcacaaaaaaaaaagagtactgtttgtatcattatggtggtctgatagttggaaggaatgatatattgtgtcaaattgtctactattgggtagcacctaccagtttcctcaccttttcttggattaatccattcaagattattatttcttagaatattgtatgatacatatactatctataatctgttcatcataaaattctgtgtcataaaagaaagcaacagtttgatttcacacactaggatcataatatttagtttgaacattaggacggaaacaggaaatttgattcatcattcctataatatagtactcacatgcttttttttgtccctggcacgcttgacatttcaatctttggctttgcagttgactagtctatcagaaggagacagggaagccttgggatatattcttaaagcatcaatagttattgatgacatcttttatgagcaggtacatctttcaactttcttcatttttttttgaaacacatattttttattcttattcgttggatatgtcgtttacaattagttagcaaagattatcttcagtgataattattatttttactgcattgcaacttcttactaccctggttctcgattaggtttggaatagcaactgcacgctgagagactggctgaaagcacgtgctaactactcttcttttgataagttgaagtggttgtattattccattaataagagtccatggtaatttattttctattgaagtttcttcacgcatgttgactactttaggtttatttgtacattggatattttgttggttgcatggtgacttgcctatgagttaagatcatgatcttctgaagtctgcatttagtatttgtcttgtgttgccacgttgacgcatataagtttacatgtgttgtgtggatggatatagtttgtatcctaatttttgtgtatctacatctttatgagaaaattaaatgttttgtattgaagaatgcatactttctcagatgttctgtgcagaacttcagtactccatgcatgaaaatgttctttcataccactgttatctaaccattacagaccaattgttttcatttatagattttcttttttgctattcatttttttcatccttaagtttatccctacaaaacgaagtatgcttgtatttcgggctgtatggagtagagaattagtgagatatgtgcatgccctcatggactctaatgaaatatgtacttggtgaaagatatagcagggagcatatttatctatgattagggtgtttatgagcacaaatccattttttattcctactttgtatgcttgtttcgaactcatattatctaattagataatgtataactactatgtattttttagcatcttgatagatgttattatttgatattttcccataacaggtcctgccttgatgaaaataaggcttttctatcgactgcagattctgctgtgaaattactcacagatgccaccaaatcagtttcaggatggaaggggattgagtatcgtgctgcatttcctcgagataatcctcccggggcaaacttttatcctcctgatatggacaaaatggtaagattgtgcttagtcacttttctgcttcccagtgctcaaagtatccagtacaaatttcatatgcagtagtacggttgcttactgagtactgtataagtacgtttgatgtgtacttggtaccgtagtgactgaagcagggccaatttgcatatgttttgtatgtctgtaggagtttgaattatggaaaaatggactgcctgaaaaggagcaaaaatatgcaactggattttttactgtcataaaacggcatgatgccttgttgccttcaatactagcgcagtcagatggatcaaatcaaaccaagacatcagatgatcttttcgttgttccatactctgaggagtacaaatcatcccttgagaaagctgctgagcttcttcataaagcatctgaatgttctgattctccaaggtaagctagtacttcctccgtttcacaatgtaagtcatcctagcatttcccacattcatactgatgttaatgaatctagatagatatatatgtctagattcattaacatcaatatgaatatgggaaatgctagaatgacttacattgtgaaacggagggagtagtaatataccagcttttagtttctgaatttagaacttatatgcttttatcttcatgtagcctcaagaatttgctcaaaaccaaggcaaatgctttcctttcaaatgattactatgaatctgatatagcttggatggagctggttagtgtcctaactctcagttttagttcattattttctctttaaatttacaaatgtactggttttctcactagcttgattccttcgttcttggagaaattgttcttgaatgttttaaggcaatttgcaatcttttttttttggaaaaagagaacagtaggtgagttccctactgtagaatgtattgtcaataacacaaataatacaaggtcaagagttttatggtgaataatgtgtggtttatgagcactgcagtatatagtgtagaatatttgttgggtgtatattcataaaattggctgtatttgtcagatttaacagcaatgtttggcatgtacaaatcaggatttgctcatataacctctgtatttggcatttctatctttataggactccaacttggatgtcactattggcccatacgagacatatgaagatggtctttttagttataaggtatttgtctctctttcgagatctacaaagaattttctccttgggatcctttcctacctgttcttgtcatctacctatttgctggtcaagtatttagcatggaatttgcatcaaacaccacatattattttgaaacttcagtaagcttgctcgttatcacatataatgcaggtttgcaacattgttgagtgtgtgcctatttcctgtgttcaattgttatttgtgtttattaactaaatgcccgcgtgcttgctactgataaaaatgaatcatacacatggagcaaattaaatgaacatatgccctctccttttttttttcaatgaaggcaccctcaatacttttatcacagggagtacttctaaaactaactttaatactacatatacatgtgacgttggtcatcttagaccctttccgaatttaagtttgtactttagagaccaagaaaatgatagtatatgaagggacttatatgtaatattggcttcaggaagtatttggtaaaaaatatagtggggtggcagattcactgctacagcccaccagcaccattgacttcctttaataggagtataggtcttttgatggtcatgatattattttattctagtagctatgattttctcttcatacctcaatgctggggctgcccatattatttgggttaaatactaggattttaattcagttaggcaccaccttatccccaatgaagaaagtatggcctataatagtataggaatagagtaggcgacattaccatttagattagggcatgtgtttaaacatgtgtacaggatgtgcacatgcacttttatatcttgaatcaagtttatctacatactaagtttatgcatagagttcaataaaatatatcatttgtttttactagtattttctactattttaaaggcaacctttgaagcatttgttggtgtacgggatgacattgccacttctcaagttaaactcttcggtgatcaactccgggtaactctaatttattttctgtagaaaagtaccaacttttgatttacatgaaatttgatcttaaattcaggatttagagaagcatcttccactggacaacatttacaaatccgacaatgtatctgctgctccaattcgcgttatcaatcttctgtacaactctggggtatgtcccttttgtaacatttctttaatttttggggttcatttaatgctttattttattactgtgaatttgtgatctccctagtcatttgttaaatttctgtttcgatttgaactcattggtacttaaagttttgatatttgtagacacagaaaacttgcttgttttccctttttgcttggtggtagatgggcatcgtcaaaaagaagcttatgcccttaaatccctgagaagcaagtattcagccttttcgtaatatctaatgacaattgatgacacaccatgatttcatgacttttcgtaatatctaatgacaattgatgacacaccatgatttcatgagaggattgctttcttccttttgtttttatgatcaaaggagaaggttgtttactttgtgcttttcttactactgccccagttgcatgttggccaaagaattattgcttagattacttcagcttgagtttgtcactataattggctaaaccattctttgagatcttgagacaattgataggctgagagcgcgtgcagggcttgtgtatgtattgcagatgatttgttgtgccaacagcttcatgatgaactaaacagggactattgttgcaggatgtgaaaggcccacaaactattgcttttaatttgcccaatgatgagcggattgtgaatgaacgagggacctcgatggttatgcttaagaacatttcagaagctaagtatgttcttttaccgattattgtctataaattttaaattggtgactcaggtgatccacactatcagtggcaagtggcaacaaaagtatgggagttcctttttggatgattctaaattttctttacttttcaggtttaagcatatcttaaagcctatagctaatgcttgcatcagagaggaacaggaagattatgttgattttgagccttattatacacatattgtttgccatgaatgctgccatggaattggtcctcattccataacccttccaactggtaaaagatcaacagttagaatggtacgtaactttgtatattcatagaaataaacataaaccaatgcatgaaccttaggtgcactataaacatgtgctttgtttccctcaaaatttgccaccaccttcaaccatttttttacgtaatgtcactaccaaatttcttgtcagattattgacaaatatataaaaataaccaaatttataagtatggatgttgctatagaaaatgcagcatattcacttagcaatggaaaataactttgctaatactcaggtacatgtaggaaaaaaaagatgtgcttatttatctgtcttcacactttaaatttgaaatgctggttatttctctgttatctgatttatagatgacctcttcatgaaaaaacaggaacttcaagaatttcattcagcattggaggaggccaaagctgatatagttggtctatgggcactgaattttcttattaaaaaggtcagttgctttcatcaactatcaagctaccatggcacttagcttagtcgagaccaggcagtcaaatcctgctattgctgtatatgcataagcaaattttcatttggctatatcctcgtttgtgccgtcattactacttagggaaaaacagaaacagtttttccaaactgcatgaactgcacattgcatgagcaccaactgcatgcaattttgcattgactgggttgtgcaaaaccacttaacccggttttgaatagccctactaataatagcacatctgcttctgctctaccagggtttacttcctaagagcctatcagaatccatgtatgtctcattcctggctggatgcttccgatcgatccgctttggactagaagaagctcatgggtgaggctttattttccctgttagcaaactgaattatgtttctggaaaaaaagggaacgcaagtacttctcaattctcatagaatctgtactgtcctgagctctttatataaatcactgttactatgtgtgcagaaaagggcaagctttgcagtttaactggttgtatgagaaaggggcttttgtcttgcattctgatggaaaattctcagttgatttcacaaaggtatttctctcttttttttccttaacattattattgtcatgctgtcaattctcattagaactttgtgccatgaaaggttgaggacgctgtcgagagtctcagtagagagatcctgacaatacaagcaaagggcgataagcctgctgcccagtctcttctgcagtcccatgcaagcttgacgcaaccactgcgtgtggcgctggacaaaatagaacacatgcaggtagctttcaaatttaccggttcatactaaaagaaaattgtaaactatttttcatggcttctctccgagtgtttgattgggttttattttccttgtttatattaacatgttcttgattattttaggtgcctgttgatatcactcctatattcggcacagcaaataagctgcttgcaaacgatcagtagggtgctcggtttagcaagctacgtgcttcagtggaactctgcaagaaaacgtattttgttcgatcctaagatactccatgacaagaaaagcgaaacgggaagttaggaataaatggacaagttatccataaacaataatgttcatgtcttatttttatatttattacgtctttgattgcgagaagaccccttgtaatatttcaggattatcatcagactgctgttgttctatggtgcatgagatgaccggggaaatcacgtgaaactacactggatagcagtaatacactgatcgttctgtccacaagctaaaagcccgagaaatcacattcaaacttattttgctttctaaaacattcaaacttatttgttctctttttgaaaaaaaattcggtgaacttattttgctttctaaaacattcaaactttcaactgaaaatgagtgcgacgtggactttctaaaaacatgaaactttcgattcaaattttaaacttccaattcaaaatttcaaaactttcaagtcaaatttaatacttttaactaaaaatttcaaaactttcaacttaaatttccgaaaatttcaactcagaatttcgaaaactttcttatcaaatttgaaaacttccaagtcaaaatttaaaagtctcatatcaaaattgaaaaattctcacatcaaaatttaaaacttttaatatcacaatgaaaacttccatatcaaaattgaaaatttcaacccaaatttcgaaatctttcaactacgaacttaaaactttcaactattttttaaaagtcttctaatcaatatatttatgttttttaaaacaatgctaattatggtaactaatactaattacggtaattaacgttgattaccataattagcggcgcattgtgggcgcacactaggaaactcacgccgcggcctccatcgacttcttccttcctcctcaaaaccaaacgtccatggcgaccaccaccaccactgatatcaccaacgccgccactcctcttcttcaaccctcgatcctctttggacacccacgtccacatcggcgaccgccgccccaacgccaccaccaccgcggaagatgcccagatccaggtctccatctccccggcttccccgccgaacccctcccgcctattcgtccgccgcctcaaccgggacaccgtctccctcctctacgaggacgcccagatcgtctccgccgccgatggcctcctcctcctccgcgtaaccatcgtcaccaccaccgcgccatcgcggctggagaacgactacttcgtctacagctaccagtggcctggacgcccctcgctccgccgtctcccctcgccgccgttccccttccacgacgacgaggctgggatccttccccttcccgttcccggcggtgagcagcaattcaagatcgccgtgctatccgtccgcctgaacgggttcaacctccgattgttcgattccgcgtcatggagctggaccaatgtcggcaaggtgatcgtagcttcgccgcagagaccgttcccaatcaagatccccaggaacgccgctcgcctcaaccagcacatcacaacaacggcgatcacgcttggaggtgaagatggcacgatgggctgggtcgatctctatcgcggcatcctgttctgcgacgtgctaagcggcggcgatcatcccacgctcgttggtgttccattgccgctgccaaggagattggtcgatcgcggcgcggaagtcgaaggatgccctaaggccaataggggtattgctgttcttgatggttgcctcaggatggtcgaattggaagttcatggcgagatacttcctacgcgtgaccctgaaactgggcaccttgatcgtgagatcaagaactgggagctctacatgtataccaacagcaagatcaccggtgcttgggaggattggcaattggtgcacggagttgaagcttctcaaatcaatatcgaccaagcgattcatgacagcttactgcaaccgggattgctgcgtgataaaatgcaggatggcaaggagaggaaattgcacaacctcctcacatctcaacctgctctcagcctggatggtgaaggtgttgtttacttgctgacaaaggccaaattcatgcaacgtcaggcttgggttcttgctgttgatgttaagggcaacaaaatactaggattagctgagtttggcactgacacatacttgggtttgtccctcgcgtattgtcctagtaggatctccagttacatggatgcatggactgtccagacaattagttatattttagtactatataagttcctagtcctatgatttatttgcatgtataaggagcaatcgataggataattggttcatcgaaaatatgctgaaaagaggatgctccattatcgacaggatgtagacttcaagttaattttagtctatgcatttaagaattcaccgatgttcaaaaaaggtggatcaaatttataattgctttatagtggcctactgttacaactacagatctacctagtacctacccatagaagtaaattaccctagaagtaaatgtcttcttagctggtcactgtggtatattatagaggtgggcaaaattcaattgagaagatcgggggacctgaaataaattgagaaggtatttcttttttttctcaacattattatagtcatgctgtcaattctcacgtgcaattacactggatagcagtaacatacactgatcattctgtccacaagctaaaaaccgaaaaatcacaagcacagatacgtaataacacccccaacaaccaagaaaccggtactgaattgaattttccatatacacttcagagttcagagagcacatgggatcgtcaaacacaggacaaactgttcactaacattgaaatggaaaaagaagccatcacaattgttgtcaaacattgcacaacctggtgaacaacacaactcatggattgcaaaaggcacgatatatataacaaaggtcatttttctcctgctaataagtacagagatatcaaaggaacgaactgcctgaacatatgcagaacaccatcagctctctcacaacttatctgtcgggaaaagaaagaggtagtacagcacgcccttaaaccgaagaatactacgggtactcagatattggaacatgatcagccgttactgaggtcaagaagtgaaatttggcaaacgagttcccctcgttgatcctcttcttcagtgaacacatctgcctcttcgtccgtgggaacttacacggccttcggatgtccttacacgtgtcacacgacagcatgttgtacaggaacacatcctccagattcacggccacttccatgatacgcttgataaacgcaaccaagaagtcttcagattggaagcagaagatggtgagaacggacaggttgtggtgcttgaaatcctcagcagaagattcccactctacactcttgttcgagctgtacaaagacgccctcatctcctcgtccttttccatgttacaccaatgatcccatacctgcatgaatgccacgcatatacaagaaaatggtgataagaaataagtttgtggttttgcttgcagctgtatgaaaactgaaaaagcaagcaaaagttttatatcaggtgcaggtgcttgcagctgtgtgaaaatggagtgtcagatagcaacacaccgtcatgcgtagctccttcaggaaaggcgctgcttcgagaatgaacattgtccatgtgagatcacatccttcaggaacacgaaacagattcacaagccttaatttgtagaaaacagatgccagtttttgtggtaattctggttgaacccaaatctggaaggaaaaaaaaagtgagtcgagtagagaggaggctagctcagcaaaaacgattaccaccaacttaccttttcactcttaaaattcaaacgtagatctcttacagagatctttccaaggatcttacttagcttgaccaacttgtgccttttaagaccaacacctgcaagccgtaccgcctcgagtgagggcacataaccaaaagtcaggggatcttggaaagatagccaaccctcaaccatcaattgtgctagtttcggcaagcagttgagcttgatgctttcaaaacggcagctggcaatattgagcacattgagctgtggatgttcaagttgcagcacggtcaaatttcctgaatcgcagttgaacaaacgcaaatactgtaaattctgacaggtcttgaggacgttgtggatgtccgattcaccaaatcttagattccctattatgaggcgtgtgagaccaccaaatgcagttgggcaagcatcgaaaaatgacatgaatcgtctcccgtaatcgatcaaatcatcatcagtgcaacgggtgggtagcttctccactataattgtgaattcggccatctcaaccttttgtgttgtcatggcatgtccaacagtttgtccaattgagatacagtcaccttcattcaggtagaacagcatgcgcaagaggtggatggtatattcatctggattcctgcgttccaagatgctcttcgttgcttcaacaacagcggcattggtccagaccaacacatcatcagataacatggatgcaccattaggcatgaagtgaacaaagtctataaccaattgagaaagcatagaagggagatgcctccaccgtctggagaggacactggttcttgcagcatcgcggacatggagccggtcaaggatgttaagcagaatatcatcaggtaacttgcttagcctgtcactgcctttctgcatttgaccaccaattacaaccacaatcaattcaaaatttaagcattattactggtcaaaagtaaaagagtaatagatgccatgcaaatgatatcatcctactcctactgggcacataacatagcaggcaaaaaagggagggaaggagatgacttacgcggttcatggttgctccaatgcaatggcccttggatgccgctctgttctgcttgccctctatgaaatcttggtggtacaaggcaaccagcagttcactatcttattttcctccaaccatagaatccttctatgaacgattctgtacaataaggaattgttagattgatacccaaatgtgttccaaaaaaagctgataaccaaataaactttaccctttttggcaatgccagtgtaattcagtactgtttgattagcttccaattaagtcacagtgttttgccgcatgatttccgtgcagccttgctcacggctgcttcctccactagatcaaattcccaattgccccccccccccaccccaaaaaaaaaacaacacatcaatctgacggaatttctcgatccaaccgcatacaacgaagcgtgcactatccaatacagcatgccaagtagagagactagagagaggggagcgacgcaacgtactcacaggttgacgacgagcaacgcgatgcaccggtgatacgagcggcggaggaacgcaggcggatggccggccgacggggaggcgaggcggcggaggaacgcaggcggacggctggccgacggggagggcggcgccggcgacgtgagcggcgcggctcggaagcggcccgcgctgcgtcggcggcgggagacgaggaaggccgcggcgtttgcgccgcgtgacgtactctattgagtgggccggccttaacggagcaacgcgagatagtttatatacccaatttaaattcgaattcatatttaaatattttttatagagtgaagtgcatgagcgggccctaaacttgtgcgggcgtgtcatctagatctctaaactctcaaaatacatttttgagtcctcgaacttgtcttgagatgtcatctaggtccagaggagctctaacccgctccatgcgctgatgtggcatgtcacgatagcacctacgtgccacgtgtcaagcacatagaaaaaataaaaataaaaggcataatttctcctctctatcttaaattttttttgtcttttttatgtttacctaagaggagaaaatatggtttttaattttattttttatatatgcttgacatatggatttcaatgacatgtaggtgccaccgtggcaatgccacgtcagcgcatggagccggtttgaaccggttaggacctaaaaatacattttggaagttcaagaatctagataacacacctacacaagtttagggaccgctcatatactttactcttttttatatataatattcatacggtatactatatttataaatataaaatctatgcacatgaatatatttttaggttattagatttttatctagtttcttttaatttttctaacttgtttttttttaaaaaaaattatggtgcaggaggagcgtatgtgttagggggagggacagggtgcctgatcgaccacagcgatcacccgtccattagccctcccttaaacaaggtctcaaagcgtttgtttgatctgatcatcgtctcacgtgacgttgttgtgacactgattttgataattgaaaaacacgttatatcgtgcattacggttcaagtataattcaaacttgcgtcaatataaggttgtgttcagcacaaggagattgatatgaaaattctttaattttccacacacacgcttttcaaccgccaaacgacatttttaaaaaaaaataatattcatattaattattttaaaattttaaatagttaatatttaattaatcatatgctaatgatttactacatccgtcccattataagtgcagttatggttttccgtgtccaacatttaaccgttcgtcttatttggaaattttttatgattgttagtgttgttgttattagatgacaaaaatgaataatattatatgtgtgtttaatttttctatatttttttaaaaaataagataaacggttaaacgttggatacgaaaactcacaagtatatttcaactagaaaaaaatgcccgtgcgttgcaacggatgaagtatattttaatcttgttattgttatatggttaagttaaaatgaaattcattgtgggagttcgcttggatatatatatatttaaaaaatcattagctgtagttaggggtttgatcgtttcaagttagcatgtgagttttttaaaaacaaatttcttatatgattccttctatattaccaaaagtgaacaatcttgaaaaccgattcaaatacgaatatgtatttccaaaagcaaacgaacttaaaaactgactcatacacggatgacgtaccaaaataccggcaaaaacatcttcaattttcataataactagaaaaatgcccgtgcgttgcaacgggtgaagtctattttaatcttattattgatatatggtttagttaatatgaaattcactgtgagagtttgcttagatatatatatttttagaaaatcataagctgcagttaggagtccaatcgtctcaagttggcatgcgatttttttttaaacagatttcttatatgattccttttgtatttaccaaaagtgaacgatattaaaaaccgactcaaatatgaatatgtattttcaaaagcaaacgaacttaaaaatggctcatacacgatacacgaatgacgtaccaaaataccggcaaaaacatcttcaacttttataatagtagagatagagatatagattaaaaccaaaacataaaattaaaactgactcaaacacggatgacgaattataaaaacatctttaatttttataaccgactcaaacacagataataagatgtgaaaagatcttcaatttttataataagtacggatagtgattgggacggaggtggtaactcgttttacctatctttctcaatctatcctattcgattctcgtcatcggcgcatcgcctttttctccaccgcttcacttccccactagccacaaggcccacaacccaacaaccttccactgatccacacacagccgcgaggagagagaaagagagaggagagagagatggcggcggagctgacggcggcgcagctgcgggcgtacgacgggagcgacccatcgaagccgatctacgtctccgtccgcggcaaggtctacgacgtcacctccggccgcggcttctacggccccggcggcgcctacgccgtcttcgccggccgcgaggccagccgcgcgctcggcaagatgtccaaggacgacgccgacgtctccggcgacctctccggcctctccgacaaggagctcggcgtcctcgccgactgggagaccaagttccaggccaagtaccccgtcgtcgcccgcctcaccgaatgaaaaaaaaaaatccccccaaatcaacccttagattattgtatcctcttgtgctctacagcttaattccatccgtaattccatgtgtaacttattattacttctccctgtgtgtcagtgtgtctgtgcttgcagctttgctctctggttgcttgattagctgcccaataatctgaacaataagaaatctggggagtaatttaagtattggattgtctggtctttcttttttgtgattgccgcttgatttcttgtgccataggttgttcttaatcttgatctgggtattcttgtatagaagaagcaatgtgctgaatgccttgaccacagaaatttcatggctgttgtttgctgtacaggttcatttggttgtgttcatcttggtgctgtcatagtcagataggtacaacaaaagcaggttctttataagatttttttcttgtggtagtcgatggatggatgttagtgttagtttttcgttctttcatttctggtggatatgctagctttggcaagtgattattttttggttttgtgtgtggattgataaatcattgaagcaatgcacagagacatcagacatcaattcagtcgttaactattacagttttgaacaatgaataattctatatagattattgggatatagataattgttttgaccaatatattgtaaaagttgattacttgataagctttatgactatttcctgtgtcttcttctctctgtcttacctgtttaatatctgactgttgtacgtggaggaagacatgaatgaataatgagtttagctcctaaatgttctcgtggatgttctgattggggagaaaaggtttgttactgatatttggtttgtgtaggctgataattccagcagtttcctgcatcctcgctgtgtgtacattttattttgtgtgaaaaggatattgatatatatggactctggatcgtgagaggggggtatcaattgttataaaggattcctttctttgttttctttccaatttccaatcagcttccatgtgtgttctgaacttctgatacttcaggccgggaaggtggaaaattcgctccgttcccatgaaaaccctacccctcccatggggagtttttctattatattaatatgaaaccctacccctatgagcatcctatggggagtttttctattatattaatatgaaaccctacccctatgagcatcaatcctggagatattgacaaagtttccgttaaaccctgaaaaattcgctcctataggagtcgaatccaggacctcagatgctaccgaggctcttgtaactactaggctacatgccctttcacaggcacaggcaaattgtttgcaacattgttctgattcactgcatatctgaatgaaaccatgaatcaccttacagatattttaacactagtgaatgcactgtgcgtctgtgcccactgccctgttacgaagaatcattatcgttagtttcggtccaacccttgttacgtgcaatcacattggccccagttcatcagttagaacgtgttcacttttgttaccactttcaaacataccaatttttaacattaccaaattaattttaataaggcaacaaactaaacacatccttatcgatgctaccttaccaaattaacttatacattagtaactgtagaattttctacttttaaaaaatctaccaaatattgataaggcattaaatttagggcatgttcagattgtagccaaaataaaccttaccaaattttggcaggatttcttatgtatttatcaaatttggcaacaaactaaacatagatattttttgaaaactttaaaaaaaatggtatggttgaaaatagcatcaataacagcccctaaatacaaccatcaaaatgtgtcaaaattggcagggttaaaagtggatgtaaactgaacaaacccttttactattttggccgccggttgttgggccgagctgcttcatgggccgtgcacaccggagaaggagatgatggactgatggctagttggacaaacctgagccgtccgatgcagatggacggtggatggagtggggggaaccacacgccgctgacgtagctacatgaagtcatcagactccagccgatccgcccacacatgcgcgacgcgcgtcccacgcagccatcaccggctcaccgccgccgtcgcctcgtcgccgccggcccggccgccgcctcccctcgagctcgtcgtctcgaggagcgctcgggttccggtcgcctcctcgtagggaggaggaggatcggaggaggaggggtttcacgccatggtgcagcaccagtatgtcccgcgcaagcggcgggccgagcgctcgttggcgccggcggcgccggcggcgatcttcaacgtggaggcggaggagggcagggccggcgatgtccccttgcacaagcgcgtcaaggaggagctgcagctgcagccgccgccgccgtcactgcaggtagattagattgaatttttatttttatttttttgttttttggttcctcgtcgtggctacgtgattgcggaatacttagcctgttccctattctaaggaaatggtgttatggatttctccattgagaatactaatatattttatccggattaggagtgagatcagcaggaactatttcgtacggtcagcgaaaattaccaccagaaatatcttacagaaatcacttataacgatacccaaaaaaataaaacattgacacgggttgtaaatatttgtgctccttgctttaatctggatatccaggccaacgtgcttcttgatggagattgtcaatccaattaattaggcactcaagggtaattggagattagtgaggagggatattatattggttaagctttgcgtgagagatgctattattacctttttattttgtttctttttcttttcagctctggcaacaaatggatttatttccgaacaaacaaaaaaaaaacatcctaattgagttgctagcgttgattttaggagacagactgaaatgggtaagccaaactttggcgcaacatgcataaaggtagaggatacgagtccgcaattgtgatattggatttgggatggattgttttgtagggttttgtaacgtaaagtgcggctggtaaccgaacacacccttcgtctatgtgagtgaatgctactactacattgaatgctactttattcattccatatctcgctaatttggatgtttgctctagacgctccagacaaattaatctggaaatggaaatgccatgacatgtcctatatttgttccatatctcgctaatttggatgttttctttaggcgctccagacaaattaatctagaaatggaaatgccatgacatgtccttttatgctcagtttgatgacacgctggtaaaaatatatgacttgacatttactggtaaaaaatcaccgtgatacttcctctttagtttggttggtgcgggtatagttgtatgttctttgcaaggtggtcaccaagaaggagaggaaagcctttgatgcaggcctgattttggttacttggctgatttggaaggaacgaaaggctcgcgtgttcaatggccgagcctcgtcaccggcctgtttgtgtacgacgatcaaggatgaatgggaaacgtggctggcggcgggtttgatccctcttccttgagtcggcttgtttgtagctctgttcggagaggtctctgtgtgtttgctccccatctcctttgagcggcggttttttcgcctcacttaaagggatgtggccctatttgtaaccaataatgtacattctttgctcttacttaatatatttcggccagtattttctttgccggcccagcggaagtgtttgaaatttcattgctatttgttcagttattatgcatgtccgttttttataccgttaatgagcgattgtggcaaaatacttattgaccgtgtgtatgggaatatgtaaatcttatagtgcattgttagacattattataagttaggagtttttaaaatatcaaaatctgaaaaattatcagttgtaaaatggggcaacatacaaaatatatctgaaaagtttgggatttgattaatagcgttgtatctatatgtatttgtacaaatatccttttgcgtgctaacataataatcatatactatgtgattagctaacacttcaatttatcctctaagtaccaacatgatgttttgcaggacatgcacatcctcgatggaagtagcccattagggttgagattaagaaaaagtccatctcttttggagctgattcaaatgaagctggcaatggaaaatacaaaaaaggaagacataaaatctaggtctcttattgctagtgaacgagtgaaagcttccaactttgctgcagattttttgaaaattggcacttgggaggtaagagatttcctgttaactgtgttagtactaatatatatgttatcatgtaggagtagtaagtacaacttagatgctctctttcccaaaattttggtttaacattgaaggaaatattgcttatttgcagtgcacgtcacagtatgaaggtgatttggtggcaaaatgctactttgctaagcataagcttgtctgggaagttctggatgctggtctcaagagaaagatagaaattcagtggtcagatattattgctttgaaggcaacttgccctgagaatggaattggaaccctggatcttgtggtaagttccttagaatataggctatttttgtattaatgctttaattgttgcaataccatagtttcttagataagcttctattcatttctgaagttggcccgaccaccaactttcttcaaagagactgatcctcaaccaagaaaacatacactgtggcaagttgcatcagatttcactggtgggcaagcaagcataaaaaggtaaaatattagtttgtagtccattatatatagagccatgtgcccatgtttcatacattaagattggttgcatgaaagttgtgagctatgagcctaccgtggtactttttgctgaacatgttttagttttgcatacatgattattcttgtgattttttatttagtgttacttttgctagttgttccacttatattattatttgtttttgctgggatgaccgaaggaggtcatctaatgttattaagataggaaacacttattgaccgtatattaagataggtcaaccatttatattattattattatctactgacctctttattttgactactaaaatgaaaatgattgaaatgcaggaggcatattctacagtgtcaatcaagtttattaagcaagaactttgaaaagcttattcagtgtgatcagcgactaaattatttaagcctccaaccatatatgatagactctcctgttttcagacctaaaacggaaggctctatattcgaaaatccaaataaatcaaagagctatcatggttttagttacttggaaggtgaacatgaatcccacttatccaagtatattgatcatgtatcaccatgtgattttcctttaatgtctaaaaaggatggaatgaaggacgatattgcgaaccaacaacagtcattttctcgaccaatcaattggggtaaattattctttcctccaagacatggatgatatgtttatatatgacctactatatctatctaattatctaatattaaatgttttcaggagccagtgatgtagatttgcaagttgatgtatctcaagaactaaagagccctcaccccaactcattgagtcaagctagatccttgtccatagatgacttgttaagccatctagatgattgcatagttgagcaaaagcctgcagggaataacccttcattgcccattagtgaggcatcatccaatgaattgttggagaagattacccagcagcttttgagcgactcacatgttgcaccagcctcagatgagaaacgggtgatggcaagggttggttctcttctttctctgcttcagaaagacgcagtgccagccaatttacccaagtttgagcccaatgacagcggcaagattggtgtagttgaagtgggaatcagctcagcacttgatatgggaatcgcaaatggcacaaaccctcctggcatctcaagaaaggattcctacgaggagcttttgtcaaacttgttcaacatatcagaggatttcgatgactgaagcaggttggctttgcggttctcattccaagaattagatatatgctatgcaaaacatgtaaatatgagtgataagttagctccttcaaaacaaaaaatatatatattttagcatctcctttgtaaacttttaaatgattcattagattgcgttgcgtattcgttagttcattgctgagtaattttattttgcaacaatgaactgccaacttgttcacattcatcatttcaaaagggcatgcatttatgtgatagtactgttctcaactagcacttcctagctgcatgtaggcttcaactgaaggtgatgacgagtgcatgtatgctgctacctgaaattacaagtttattatgtttttgttcggaaatattgcatgggttatctagtgtgggagtttgttgaaacaacatgaatgtttggaatacaagctatatttcctcagtgtctcctattataaaaagtctgactatttttttaaaaaaaaatgtgcaagagctaataaatgtggaattaactataaaataaattgtacaaactgttgatatggttcttaaattgttatcctaatttgaaatcatcttgttacttttaaactctgaacatcaataactaaccataaagtacactatttactgtagttctcatgactcatatctgaagacataagtttaagttgtgatacccatgaattagatttgaaaggattgcattggattcagaagcattacgctatgtagcaaaagagctcatgcaaggaaaaggagtcttgcaagagctcttataacatgtaaacacttgcatttaaatagaatacattacaagcatctcgcatacacttgcagcctagaaacaaataggtacagcaaacagaaccccttcatctacacacaagccataaaataaaataagataaattgaattttacacaagataaagacatctgggaatactcttaaactggtatccgaagatgtgtagaacttggaaccttgataatattacttaatctaagcctataaggtatcaggtggtggtgcttctccctcctcatcaaaggcttcattttcatcgagcatgttcatcagcatagatacctgctcatgaagcatggaattttccttctctatctccgttcgcttcttacgctcatctgcgagctgcttttgtagaagctcaagcactcgggagtcttcttccaactgttcattcaggccattgatctcacggtcctgccacagcatttccatgaatataggagtcaatgtatgcttcagtgagcaacaaatagaatcgcatataattcaactttgggtttaactagaccaacacacgtcgtaaattgaggataaagttagttttttcaagccttgatcatcgataaaaaaaaaggaaaaaagtataccaaatgcatcacgatattgtgctagtatgtggtattgtggtacggtagcaaactattaaaaagatcatgaacctttctgttcatttcttggattgctatcctcctcatgctctccaccacatcaacattcacaagcttgcgtttcttgccaaccagccatcccttgggatatgacgcgggctcaaagtctggtggtgggagcaacatttcagcagaactgcgcttgccgttgattggttccaaaggctcaaacagcgccttcctcttctcagataagttagcttttggatctggatgaacatcgtcgtcagtacttactgcatttgcatcatctattttcatggcctcttcatgagcctgattgttcagttgttcatcagcagcctctttgttaagttcttgttgcaagctccggccattggctggaacatacatattgttagtcagattcaagagtcagtgcacttctctagctaaaatctaatgcatacaggtgaacattataactacatgattatatggaagttctttaatttcagagtgtgttctgctatcatgacagcctgataacttgttagcatacatcagctcaagaccaacgaacggtctctcaatgtatttatattgacatatgtagaccatccttggtgatgaagcaaagtatcaaggtacaaaaacagcaactatttggaacatgcacaattaaacaaattatctcctgcaagttctatgcattgacaagccttacattttcaagagcaaaaactgattgatttactttggcctaaggcctaagctaactggtcaacaacacatgttcaaaaaaaaaaaaaggttcaatattgccacatgcaacgacaccctaaccttatttaacactgctaactgctaaggtcgacaacatgctatttaatctgacactctgaccccgggaaaaattattgcacgtgaggccataattactgtatgcgaccaagcaagttcgtctatgtctttgtcaataccaaaattatctagatgcagttgcaacttaattgggagttgaccaaaagagcagtgaaatcatagaggatacatgagcaacaaaagaagtagcagccagatgcaccaataaaaaatctcattccacaaagcaaggcagtaccaagttacggagaggaatatgatttgtttctgcaagcatattcgcactagcactggtaagctacctagcaccgacaggtgcagtttcagaatcttggcggtaaagacaagcaaattaagcaggccacatcctcttagtttagttatcaaggcgcctctaagtcttaatcctcatgagcttgcaccaaatggaccagccaaaccggtgcgtgattaacgtgtacggaataataattatatatcgattcagtgagctggcaataatttaatcccccacgaaacatctcactcagaaattattccatgctaccagctacagtacgtttagcagcaggaaatttcgaggatactaacttgtaagtagccaagattaccagtaattaggtgtaaaaccgtaaatcaaagtgttgtatggttcatacaatttttttaaaactgaaagaaaatgcagagaagcttcgaaagggactgaatttgaagctagcgagatttaatcaacaagagattatgagagaaggaatggatatctcatatctgagcagagcaagaagaagcaggagtcgaaatcagcatgatttacatttgaatgaagcatgtaattaacaaagcacctgaggctgatctcctcctcgacttccagaaaatccgcgggggatcagccgaggccggctcctccatggcttgctcttgctcctcctcctccttcactgcagcagagagaatcaaatcacacaaaatcagcttggcctttgatttctcctcacctccatgagcctcttgagggggtgaggctctcgactggggaaacaagaaccacaccaaagcaaaaacaaacagagagaaaatcaaaatcaaaatcaaaatctcacctcttcttcttcttcttgattgcgaagctacctggacccgttctatctgcttgcaacctgagctctatctctctctctctctgtccctctctctatcaatctatgggtgcgtgccttgtgagttgcgttatcttgtggttcttggctgaggagggttgctacttgctaggacggcgagaagagagaggagaggtgggtcaccgggtcgccttcgccttggaagcaactcccgtttgtttcttgaccgtctcgcgtgccttcgtctccgaccgcctttggctttttacttttgaagggacgcagagagcgagggcagtgtagtgtgggggaaaggctgaaacggcgttggcgcgcacggggggcgttggcgttggcgttcgttggttgcggtcgcgcttggattacccgccaacaacctcctctctctctccggatcctctgtggctgcttctgtgttgtttgtgtccaatcctctttcgatgagatactggttcttcgtcctaaaatataacaatgtattaaatgtgatgtccatcttatttaaaagaattttgtgattagtatttttattattattagatgataaaacatgattagtacttgatgtgtaactatttttttataaaaaaaatcataaatatttcaaattagataaacggacagtcaaatgttggacacggaaacccacaactgtacttaaaatgaggcgaatatagtattactgttatgaatctgaatactatgtccagattcatattgttaggatacgtcatcctttcgtttatgctcttcattctaggaaaaaaaataaatttagaattgaacttactaatactcctttcgtaaaaaaacaaaaaaaaatcaacttctagagtttgaattttgtcccacaaaaattttactatcctatctaccctcagcacgtaaaagaagaagttttataccttcaatactctttacctacctatcacatttattatttttttattgattaaggacatcttaatcactcttcattttcactaatttcacctcgggatattaggaatggatttttttttatacggagggatattaggaatgaattttttttatacggaggaagtacatctaatactaaattcgtttttagtcggaagcagtactgtactaataggataaaattggagacaggccaccagcagccgtgcaacccaaagctgctaatcatcatcaattccggtgtactggcagcacagcgactgacaccggcatgcatggaaggatgcaggctatcaatgcgagagctaccgcatagccatgtgaacactagcattggatttgtaccaagccgcgagtacgtagtactactaccgtccttctctccaaccttttccatcttgggggcccaacactcactgcactgggccatatctgagcccaatacctcaaatagtagttttgaggctttggctggcccagttaaagacatcagaattctcttcctcaaaaaataaaaaaaacaaaaaaaaaacactaagttatgcattgcccagtgcccacgctgctacaatgactggcaaccaatagagcggttttatcccctgctatggcaacaaaacaaggcacacggacatgtcaaacgatccatctcactatcaagacccagagattgctaattacatcatctaaagcagtcaggtaaagaaaaagggactatccaactccgacttgagccataattgacccagaaaatttctaccaacagattattgttgagacctcaacctcccaacctacattgtatcctaaaacgaaaacctgtaacctatatcatggttcatccggtacaaatcgatgctgctgctactgatcgttgatcagtgcaacgtcaggccttggcagaatcaaggcagccaatacactgggaaggctcagcgaggccgtaaatggcctcaatgcagctgctatggaatgcatggtggcagcccaggacggccgcgactggaggagcattgtcgcgagcatcgtcaccttgaggcctgaatgctatatcgagcttgcacagctggcaccttgtccccaatggctcaactggtggcgcctcatccttgtccgtcagagctgaaatcgcaacgaagaaaatgtgatttaagtcaaatggttaagacggacagcaaaaaagtaatctttgccttgcactgaaactgtgatgaagaactttacctggtcctttgatgtggacctgcggttgtgaatttgccgatttaaattgctgcagcagctgttcttgctgcttgatcaacaatgccttcacgttcgcgtaagcaggatctgagagaacattggatgacgagcccttagctttcccgatctctagtttcggtgagaccaatggagcagttgcaccagcctggccactgggctgtttcctagcaatgagtaacttagcaagcttcctttgaagatcatcttgcaagttttgtctgggagctgcaatgaccggagaaggcaacttattgtgtgcagcaacttgctgtgctctgttggcaatagctttggcattgactggagcaactggtttattaacaaggcttgttctgttgatcatagcttttatatttaatggaccagctgagtggttgacttggtgagttctgttgggtatagcttctgcagtgactggaaaagccgacagattgacttggcttgatccgctggcaatagcatcagtagtgactggagcaacaagcagatcagcttggtttgttccataggcaatagcttctgtaatgatatcattggaattattttttgtatcaagctgcagctgctgtgcaagttcagctgactgacaattgtcatttgtagtagcaggaccaatttttgaggaagcaatgacagaactctctccgctttcagtctccaacttaaccatagacagtggagcagctaatttaccgtccttatttctgatagttggtttcctttttggaagtacatcagaagggctcttgcccgtttgcagcttctttgatggagatgggatgactgccccatccaactgatcacctttgctcgcgctttcttcatttctctttttgcctggaataaaataatcaaaatttggattacaacatgaatgataaaaatgagttaacaaagcatctagtaagcacctctgtgaacagttgggctatcttcagcagcttgagacgaagcaactctggagcgcttggcagaaggattggttgaaggaacgcttgcccgcttcaggtcttcactcataacaataggctgggtaaggggcttccaagcagatgaagccactttatgaggggtgcggacacgggttacagatggtcttgcagcagcagattgggtgttaaagcaagggtctgtagaatctctacgcttgcttgtactagcagattctcctcccttcacatcagatgaagcagcagcagcagcagtaggcttacgggtcatagaccgagtaacagggcggaaaacctgatgatgagcaggtgtgctgcaagatggctcagcatggccagcatcgctactcactgaaatggaaaaggaaaatagaagtcagaataaaccatccagaatatcctttggatgtaatatcagcagacattaacttgaaagaaagtggccatttttaataaaacgggtaaatcttcctctaaataaaataacaaagattctgagaaattggaactctgatttaaaaatactccattcttaagacgatatagctgatcctctaacaaaggatgacactcattgcagattaattcagtcaacggcaaaatccagtgcgatgcagaactctacacaagagagaagcagcacacaaaataaagaaattaacccatctagtaagttgtaacatctcccgaaaaacaaatggccgcgtacaacaaacaacatgttcagaccaaattgttggccactcatgaaagtgtagcagagatatttatcagtggaagcaaaggcattgtagcaatgaaatctgactaatgatttgatggttggaacaaaaaaagttcccagtattctggcatctaaattatgcacatataatgcaccaacagaacatattacaactttacaaggcagggttacaatgttacaagcagagctgaattcaaccacaacattagggaggtttacacctaatatacaagagatacatgcacaattctatatcaggcaaaaaaaaactggggaaaaagaggagcacatcaacatatagcttccacatagcacgtgcacacttacatttcaacctaaacaggaccgaaccttcaagggaaaaagagcagtttgattgccaccaattaacagttcatacagccaattctcaaggaacagattacatttctttggaaaggaaacccagcagcatgatattttttcttttagtgaaacagaccatcaaaagaaaggcatttgattatgtagctccccaatccaacacaaataaagaaacacctgcccatctttacaagattccatagcataacaatcaaaacaacagcagttacttctgaattatccctacatagcggccgctgtggagccgcgtgccgaattcccaaagccaaaaaagaaaaaaaaattctggcccggctgcgtctttcctgatgacatttctctactcccagtactaaaaccactcgattaacgcgacatcaggatccgatcatggatgattcgagcaatccgtactcaagtcgcaactaaaccgtggggcacatctacgcgaaatcccccccgaaccaagaaccggaatctcccgaaccaaagccatcaacacaacccaacaatgcatcggaattaccaccagcccgcggccgcaacgaatccacgcgaaccaaacatcctaacaaaaaaaaaacacgaagaacccccacgcggaggaggattgggcgggggggttctcaccattctccgcggcggcggcggcggggggagggggattcggggccctggaggcgcgcggcattggattgggcgaatcgggggcggcgcaatcgcagggagcacgaggagaaagccctaatttattttttttttctcctcctcctcctcgtcgttttttttttttcttttcggggaggaggagaggggggaggctttccgtgtcgatggagaagggagagaggagggggttagaggagaggaagagagaagggaagagaagagaagaggtggcgggttatataggcttcgggcgtgaggcgtacgagatgggcccacacttcaggcggaggcggcggcggcggcgtggctatctgtgtgaagagacgactcgactcctctcactcctctcggctcggtgggtttgtgcaagtgctccttagagatggagcccggatgtttttttttgttttgtttttaagacaatagcccggatggtttttgaagtgtgttttggatgaaacaaactcaaggagggatttcggcctcattttcttcgcttatattttatacttaagaagatataatttgaattttcaattttaaatttgaagttgattttgagacttttcatcgaagtttattttcagcatttacttttagatcgctaagaacatatatagaaaagttttattcacaaattacttctttatttacaaatatgtcgtttgccttattccacgaataagctaaaccatgaggccgttttatcttctgcactgcattgtcactgtgtgttgtattttggtgagatcaaatattattattagttgttttacattcacatatgtaattatgtgatgtcactccggttgaaattctacgtcttgttacattttaataagatagattattatttttattatgagataattcaagaaatgctattgacaaacaccaaaatttaagagatgctatcaacgagtgcaagttctacaaaatgtcattgtacagtcaattttatcccataaacgccatcatcattggggtgccgttcatctcgcaccattaaatgaattgttcatcttatagcacttaatgagggctactaatggaaccctaatggtgatgttttttgggacaaaatcacttgtataatgatattttatggaactcataattgttgataacatttcttgtaattgaatgtttgttgatgacattttttggattttctcttttattatagaagatgcaattaaagttctacaacaattacaagtagtacaacatataccaatggtgtttaaagatatatgcaacaataaatgttctagttgaagtgaaggtccactttcttaaaaagaaacttctattaagcaatagaagtttgtttttgaataagtgtttaaaggtatcccaaacatctaattaattaaagaagtgttttcaatagatgtttgggataccaaatttaatattgggtagagatatcataggtaacatgatagatttggttttgcttttatttgttgtaggatggactaggtctattttacaaggcatgcaaaacggcaataaattataggctcatatttagctgcgaggcctataaaacaccttgagcaacgagccattttgatcctaagagtaaactgcattctgcatctgatattaaggctgtctttggttatttatcatttattacaactttgtttttcgcaatggcaaggattggtcattgcctaaaattttggtaaagattagcaaggcttttgtttggtctcctattaaagcatgcaatgggctaaggcaaaatagggcaaataatttaacaatgccatttaattgattccgactcccaaacctgatgagtaactaaattttttgtttgccaattatgagcatgttaagattgggttacaaatcaaacatatcctaagcctaccaatatacttagaaaatttcctatatagccttaaaattttaacctatccctttgatgcatcttgagttttgttcattttcttatctacattccaaaattagtttagacttccataccattttcattagttcactattacctctgtcccaaaataagtgcagtcgtggaaatccgtgtccaacgtttgaccatccgtcttatttgaaaaatttatgatttttttttaaaaaaaactagtcacacataaagtactattcatgttttatcatctaataacaataaaaatagtaatcataaatttttttcaaataagacaaattgttaaatgttggagatgaatagtgcaaaactgcacttattttgggacggagggagtattaactgacctaaaatttttaagagaagttcattatgtcctttggtacgaagagacatataattataatttttttatggagtgcgttgttggagtatcaaaatttgttgtatgggactattatattatatttatgagcttgtgtatgcgagatattatttatgacacaaaatagaggtggcataaaaataatatttatttttcaattactaaaatttgtatatttcgtattttgtacagcagcataactttttatatggagtatttttttcaatagtcatagaggcagggtgtgcgagtggtgcattcataggggtgagtgtgcacgcgttgcgagtgcatgcgttgtactgtgtttctaaaaaaaatcattacaaaaactctatatttaactattttcgagggacaaaaatgtaaaacgtaaaatcagggtcacaggcggaaagccagtgaactgttccgggccggttcaggcctgcactgggatgagatccggtctgcttgcacgcgcagcccaccaaaggcccatcaagatcaccaaaaggcccaaacatgactccggactccggagtccgtaggccccaacaggccgcaaaagaccaatcccagaagcggcccaccgaaaacgtggcgagtggagaacccagatcgccgccgcggccggccacgggcgcgaaaccgatcagccatggcatcttcctccggcgaatcgccgggttttcaggaggcctcgccgcgccgcgcatcctcctcgtcggacgcgatgccttctccgacaaccactaggtgagtcgccgctgttttttccccttaatctcaggagggagttggggttttggtagtgcgtgcgggttgcggcggcggggatcgcgagagggtggggggggggggtcggcgattgatttagggttcttaggctatcagcgctactgcctactgcacccgtcaagtatgattcccgtataaccgtattagttacgcacgtgacatcatttcaatctagtatgaactacctgtactagtacccatcaagcaaaagagtaccaagagttagctttttcgctggctataactaattcataatagagattgtggtaacttttatggcagttcttccaggctatctgtgggcttcatcaggactactgtaaaatggtccagcgaaatttcgctttatgtcaggttatcagggcttctttgagactgtaatttggtcatgagaaattcgctttatgtcaggttggatgctgcaaattatcgaccaggacattcattgtccctatctgttgcttgttgtctgcttagccgtgattttttaggttgtcaatgatgataactggagtatcactgaaggatgatggtaaagatcgttggagtgtcatgtacaggcccttgcagacatttcggtaaggtcctcctgttgctgaaaagaaactgtctgctcatgttattatctccctagtacttcgtatctgttggaaacttagactagggaagacctgcatacttataaataaaactaataattctgcattggtttgttggaatagaaaaagctgcagtgctccattccattattgcctttcagcctgttcataatatcccacaacaacgatcattaatgttgatgataccataggtgctcaaattgactaacaaagtcttccttttctagaaagggaagaactcctagaatataaaaaaagggcatgtttacctgtatgttgaatcaagttgtatttttctaccacagaatacgagcactcttaagattcagttaactatgccctggtttcagactgtcagttgagttcttcaagaaaattcctcaaagtaacatccaataaatttaccgaaaaaaaacaaggtaattgctatcggtccataactaaggtagttttggatttaagcttcaatagccacctcacatgatctttcgatctctgatggaaaatatgagagcacatcaggacattttgctatcatatttgatgtatgaaataaagcttactctgacgtatccatacgactgttcatttaccagtcttgcgcgagcatcacatcccttgacaattgaagcactcgcgatctctactttttgttacttatttgccccctttctgaagaaacaagatgggcgaaatggtttacgagatgactaaaccttcctgcaacgattacctctcttctgcagacagtgagcaggtaggcaggttaatctattctctcctgacttttacagtacttgccatttccggtccatttccaaagatatagccgcagttacatactctgtctggacacattgaagtctagcagatatgcttatcatctcctgttatttatggccctggattgtactgcatcaattattaggctaggctatacatcagcacacgttcgtgctttcttttgtagggtttgcaatagtactactgtttgacattaatttatgtttcttagtagtatatagcatgcaatgaagaacaagctgtacaaattgattcatttgactaatttcatatgtaaaattttgcaggattttgacatgaaacaaatcaagtttcgaggggaatatggaaatgtctaagccatccagatgggactcataggtataacgacctttcccctgtcacattatataacagatttaaatagtgttcttttcatccacagaactactgatgtgctgcataactagtccttcatattttagttggttgatagtagtactagttatcctctccatgtgttctaggagtatctgtatatgatgatttaccattatagcctagatttgcttattaatactgtaattctgtgaaacgtcagtacaaagtactgccacacttttggttaattggccctagttaaatggagtatatccttttggttctgctcccagttacccagtatgccataaatgtaccgtatctccatttcatctccaggctaagcagtgcgtaaattcaaactaacagagaaccctcatttaaaccatggtctccctgattctttatatatcatatctgattctggtgtaaagagcttgatcaattagtgattctcagtgtagcatttggcaggatttgtttgtcaaatctgtgcatccaaagtcttctttcctaatttacgagcatgatccatgatccatcctcctgatgaaagaggctgtctctaaatctcccgtgattgaatgttgatggtagcatgcaattggtgctgggcaaatgtgccagttctcatgctgacttatattatacgtcatcacacagcaccaggtgatgtatgagtcatctgtttctgccgcgttacctttatattctgaaatgccctgctgcttttgatatacaaccaggtgctccacttctggcagcctcctgctatactcagcttttattagacggcaatgcgaattgcattctacctggaatttcatccaatcaaaatggacctgcaactgtaactctgcaaggagtcagctagagatggggattctgtagcctgtaggaccttactagtactgaatttcatacacataataatgagttttctaccttattcgggaataaatacataagatttacgtatctttgcattaagaaggatgaaatgtttacaacaagacgcaaaagtataatctcattttgaattttaaacctctactaccagaaggtacgtaccttgttcttcttccatacatgtactgtatattacctaacgaactcaccaagcagactaaccaaaaataaatactagctgaccaaattagagctatgcagtagatcagttggtgaatgtggagctatctaagggctacggatattgccaaaccgttctttccaggacggtcactgtattcacctatacaagagtagtacactacaactcagcagcaggactttcctactacactttcaacctgattttacttttgaagttgcttccattgatctgcatctgattctgcattggtttccttgatgcgatgtgttatttttcttttgtgatccaggcagttgtgcacctatttacggaccacgagcaccatctgtgggccggttgctgagcaacttttcatgatttcatcgacacaccttgctctttctagctggcctgagctgagctgagctgaactgcccgcttccaattacaactcattcactcactcactcactcactgtgcgtgctcaaggtacgatctatctatctatctatctctccctttctcccggttcatggttcaatttccctttggctttttacgtacctaggacaagattggtgcaggagttttgagtgttgttgcttgcttgcttgctggttactgtggttagctactagcagtactgcagattaaactcaaatgtcctgagaggttgagatcttagcgtagtcatgtaggttggttgtgacgttgcaacagctttgcaaaagtattttacttgccatgttcgcaagcaaaccgtggttacggatgctagtgcagatttggcgtttatgttaaaacctaaagctgaagcttttttcgtagatgcatatacatgtaaaatcatgtaagatcgctaggcatggacagcatggtacggtgatgtgtgactgcacatgcaagttatctgactcatcaaactgtctaacgtataggtggttgggcagggatgtttttccattcaatgaaatgtcttccttttcattgatagattttgatattctatccaacaacaatatgttcttggtgtgcgtacattatatccaactacacctaaaaaaacaataaattgtggagtatatgtaaatacgataaattaggaatatctttacatacatcttccctgtaactgcaatgagaagaatggcatgtctacaaaatgcaaggtgtaaaaaaaaaacaaaatgtagatagaggcaagaatggaaagaaaagctcaaaaggtgtaggaagaaagtgccggtcaccaggacagttttctccctaacagcaccacaacggtacaatttccagtaggtgggcttgctagtgctcatacctctcgatcgtcttaccatgagcacccgtgctgtcccgtttcttataaacggcttttaattgctctcatcactagctaatccccacatccgctgcttatcataataaatcactaacacacaccaactttttaattcaagtttaattcgaactaaataatggagtattactactccctccggttccatattaattgacgttttggacaaggttgaggtcaagcttttataactttgaccatcaataactttaaaaatatttagtttaaaggaactagaacaatatatatagatttatcttttaaagcactataataaaagtaaacatgtatttatttattatatatattataatagaaaaataaggtcaaagatatatcttgtagaccgtgtcattgtccaaaatgtcaattaaaataaaaccggagggagtaccacacaccaactaattaattcaagtttaattcgaactcaatatttttttattcgcggtgacgacaaactcgatactctctcggtcgtctcaatatgtagtactccctatgttttggacaaggttgaggtcaaagttttataactttgaccatcactaactttaaaaatatttagtttaaagaaactagaacaacatatataaatttgtctttcaaaacactataattaaagtaaacgtgcatttatttattgtatatattataatagaaaaataaggtcaaaggtatatttttgtaaaccgtgtcattgtccaaagcgtcaattaaaatgaaactagagaaagcactaatctagaactagatttaatacatcttatgattacaaatgtaattaacttaatgcacgcagcaaaagggaaaaaaaagaaaagacagtttcaaaaaaaaacactgtattatggtcctcgtgatcgtcaggtaagccataaaaaggtgaaatttagctaggtggaaagtgaaagaaaaatgtactagtactacaacagctttgatttacgctcactctttttttctaaaaaaaaacagtaccttttatattaacctgtcccctcacctgcgtgggcaaagaaaaacattaacctgtcccctcacctcacctacgcgcccaaaaaaagcgtcctcctcgccgttggctttctcgggcgagccgcgtctccctcgtctccctccccccgcacgcccgcacccaattttcctccccccaatctctctctctctcgctcgtccgctcgaatcctccaccgatcggatcccccgcggctcgtcggcggcgatcctccggcggcgccgcgcccaggcgtcaggtcaggatcggatcgcttcttgcctgtatctcgcgtcggtttcttttctttttatttatctttttttttcttttgcgtttctcctgtcgatgggtcgcgcgtggaatcgttctaggagccttttttttttgtgttcgatcgcttgtcgggcaccaaaaaagcgtcggatttctccacgtcttctctccccccaatttctgggttgaatcgccattggggcacgtcgcgccgctgggtgggttgctgctgcttgcccttggaatcttcccttcgcttcgcttccggccgtcgccgaattttggcccgggtcgtacggcgtcgccaccgccttttcctttcccccacctctgcgccatttttgtttccttgcgttctaatcgtactacagtactagtagcagcagcagcagtagcgtacaaaatttcctctattttttttaatttttcctctgccaatctcgcgcattttgcccccagcagcaacgaggccccgccatttgccggctagccgttgggatcgctgcaacggccacattttatttttattttttaccgcggtttttttacccgctcctccgatccccatttgcattagtttatcatcatcatcagcagcagcagtgtccttctcctgctgctgctgctgctgctgcttaaccaaacagtagcaggagcgtactttaataatgagtagtagtagtagtgctgctgctactaatcatcgtaattaatccagtggttaaccttcgtctccgggcacatttaatcctctcttctgtggtaggaggcagctttggcttggcttggcttcgccattactgggcgtggagttctcgtgaggtggagacccaagcctcacccgaaagagacgctccaattcctaggcgtaaatattactgccagcctcgctgcagcagcagcccgaaaaaagaattccccaattccgcctcctcctcctcctccactccacatttgtttttcttttaatttttttctttctggctctgtctgtcgctttctccttcgccaaccgactcaatcccttcgatctggttcgtgctctgcggcgactctgagctcggggatttgatttgtgtttttttgttggatgatttgtgggctgacgattttgtttgcattggcagattgggggtgttcttgggcggggggtgtggattggtggtggagctgtcaatgcgggtggatttgagaccgggtggattggtggcagctgcggatggacgcctgtggaattcgggcgccaggggatgtgctgctgcggaaatctgagctctcgtcggcggcagcggcggccaagaattacggcaatggccacgacgacgccgcggtgaggcgcaaggcggcggcggggtcgccggcgacgccgaggaggcacccgtcgccgaatgccggtcggtcgtcggcggcggcggcggaggccgcggggtcgcaggcgaggaggtcccagtccaccgagcggaggccggcgaccccgtcgaggctgtcacctggcggctccagggcggccgccccgtcgtccaggatctccgccccaacctcgccgtcgtccgcgccttccagcccgtcgtcgtcgtcctccagctcgtccacgcccgtgcgcgacgccgtcgccgccgagtcgcagagcgctccgaggaggctggccggcggccgggctcctcctgatgggctgtggccgtcaatgcggagcctgtcttcctccttgcagctcgaggcgaaggggaaacgcagcaatggcggctctgcggatcaggccaaggcgagggatgcgggtgacaggaagaggagcccgtcgagggggaggagcgccgctgagcagcagccggagaatccgcacgccaaggtgattgaccaccatcgctggcctgctatgatggggggcagggtgtccgtgagcgcaatgtcgaggagcgtggatctcactgacaagatttccaggccagcactatcatcgattccatctcgcggcgtctcaccgaagaaagcaacgatggcatctactacaaatgcattggcaagaagtattgatcttgctgacaagattgatcgcctggtctctttgtcggtttcatcaccaagaacaccaactgcttcaaatggcgcagctgatgaatcgaaaagcatgagtgttagtaaaggtaccaaacctgcagccgtggcaattccatcacgagtttctgcaataataacagctacatcaggtggtataagggccctgtctaagagtatggatcttactgaaaaagatatcggtaccctctcctcggcagcatcatctcctgggatttcaccaagtgtgtcagtatcaagtatgtctaatgctacatcacaaactacagcaaagtcaacacgaggactttcacctagaagaacatcaacatctattggcagtggtgctttatcaagaaacatcgatttgccagaaaatgataagagaccggcctcctcatcagcttcactgaggggaaattcgccaagaaggcgacttgcctctgacagtgttaatgctgttgtgaaaaacatagattttgctgagaaggatagcagagcagccatttcatcgacttcatctcgagggttttccccaagaagacgacttgcctctgatggccttgatgcaatatcaagaagcacagatttttctgacaaagatagcagaccatccacatcctcatcatctgcacaacgtgggatttctccactaagaaggcttaccatatcaaagggcacggactttactgataaatcttacaggccatcgacctcttcagctgcatcacgaggtgtttcaccaaggactcgattagcatctgacagtgctggtaatatattaaagagcatggatttggctgatagagacaataaaccatcaacctcgtctgcctcattacgtggtatgtcaccaagaaggcggcttgcatctgatggcatttcaaaaaacatcaccttcactgaaaaggacgacagaactatgccctcttcagttgcatctcaagagatctcaacaataagacgtcttccatctgacggtgctgacagtatatcaaagaatatagaccttcctgaaaaagttacccgacctgctacctcctctgctgcgtcacggggcctttcaccaagaagacgacttgcctctgatggtgtcaatgctatatcaaagagcatcgatcttgctgacaaagataccggacctgccaggtcaacagctgcattgcgaggggtttctccacgtagacaactcgcctctgatcgtgtagattctatatcaaagaacacagattttactgaaaaagataaagacaccagaccttccacgtcgtcaggagcatcacgggggatttcaccaagacgacgacttgcctctgatggtgtagatgatctatcaaaaggcataaattttagccaaaaaagtatcagaccttccacctcttcaatggcatcacgagggacttcaccaagaagacggcttgcctcggacggtgttaatgctttactgaagagcacagattttactgataaggaccacagaccatctacctcatcagctgcactacgggggatgtcacccagaaacagggttacctccaagtccatcgatgccaaaagcctggatttttcagacaaagatagcagaccattcaccccatcaggtgcatcgcagggaactctacaggaagttgcccttgcttccgatggcattaatgctctgtcagaagctgtggatactgctgtcataggtagtttacagtccacgtcatcagttgaatctggtgagacttcagatgctagacttaataatggctccggtactgttgtaaacaggatcgattttgctcaggaagttaatatagcaaccccagatggttgtaatggtcatatttcagaaagcatggattctcatgacataggcacgtctgcaccctcaatgtcaattacgtcacaagagcaatcaccaagcagaactgtttctaatggccctaagactctctcagaggatatcaatgccactaaaaaaaataacagagcaatgacagtgaagattccatctcgaggtgctagtccaagaaggcgacttgcatctgaaggctttggtactatatacaaaagcatggatttttctgagaaagataggacatccataaacatggcaacaccatcacgtggaatgtcacctagaagaacagcaagatctggtattgttgatatgtcaaagagtatggatttttctgagaaatgcaatggaccaatttcctcaatagctccatcacatgtggtttctgcaagaagaatactgggaccagatggtgctaatgccatgtcaagaagcatggatctgactgataaaatcagacaaccaatctcttcaactgtccggaaaatgtctcttgctgatagcagagcaaaagcccctgaccttttgtcaggtgacatcgagagtccaggttctgccaatggaaatgaaagccaagaggagaatgctggttcaagcctagatgcaccttcaaatgattcagaaaaatctgcacctccgaaacgattggccagaacattatcttcaccatcaccaacaaaggcttcatcaatatcatcttttacccctaggaggatgccgagcccatcgaggaatagaccttcaacacctgtctcaccatgtagttctaccagatctgattctgcctcttcgattcttagctacatgggcgatgtaacaagaggaaagagaagcccaagtcacatggaagacgcccatcaactgcgcctcctatataacaggagcttgcaatggcgctttacaaatgcttacgtagatgaaatgcaatcagttcagaagatgagtgctgaggtagattttgttgcatcacatcttgccatttcacttgtggtagtatcaaaattcatttaccagtaatcatatatttttattttgccatgccgtgctagtaggtcagagaaagcaccgtactattgctttgcctaaatctaagctcccttttgttctgtgctattctcatttttaaatgtgttgaagcgaatataagtcgagtgtgattcttacttgatttattcattcgaaccagactatgctctacagcgtatgggatgctaactccagcctgtgcgattctatggttatgaaaaggagttatgttcaaaggctgcgacaggaggtcaagctaggagttgtgttgaaagagcaagtaagatttgttgagatctatgatatatgttattccattatcatattggcagaatcagatatcttttattttgctgatcattggagggcagttattttatttcgttacttagtctaatacacgcagtctgatttttaaagggtcatagaatatcttacaaagtggcattctgtttaaaacaccagttaacttctcgcatccaaagaaatgtgttctagctaaatgtagcagcagatcaagtaatcctgtcctgacaaaattatatcaaaagaccaatcctgaactttttttctgatcatgcttggttggttgagatgtggaaatataatgattatgcagacaaatgggacattatatatatccccattccaaaccatgtcaattcctgtactagtttttttgttgagcaaaccccaaagtttgaatacgggagatgcaatagtgcccactattctttcacacaagctaaaactaataatatttaatgttgcatgcctccttaattttgacctcactattctatgttatgttaccatgatgcagatggactaccttactcactgggcagcattggaaacagaacattctacttctttatctagtgcaattgaagctcttagagcaagcacactacggcttccagttacaggaggagcaaaggtatcatgataccctattaacattagtaaacttaacacctactacctccgtttcaggttataagactttctagcattgcccacattcatatagatgttaatgaatctaggcacacatatatgtctagattcattaacatatatatgaatgtgggcaatgctagaaagccttataatatgaaacggaggaagtaaatatcatgattcctgtggtcttatggggaaatataacttagattcatgctaaacaagtcttcttttctatgtttatttttgctgttttgtctgtgaaatatgaagtgatgcttatgatgtaccttttgcaggctgacgtttttaccgttaagaatgctgtcagttcagcagttgacattatgcaagcaatgggctcatccgtctgctacttgttatcaaaggtagaactaaaagacccacatttggtgaaattggtgtgttttagcatatgcaaaatgagttgtttgttttgttttgatgatggctccccagtgaccactataactttatgaccgcataggcacataggctaataaaatgatagtactgttctttttgtaaatatcctaggtaaagtggcattgcttgatcaggtagccattccatcatacgttgcaaatttgcgatagacgctgtggaagttatgatgatttgagttttgatagcgtagtttgtggtgtaacgaggcctcatgataatacctgtaagagggtagatgacattatgatagtcttttagctaatccagtccagatctgataaatcacagtaaactatggagtaaattgtactatgctgaattgccacaaattatcgacctcattctggttacagtctttgctatgtaatttaatttattagtgtcagtgccatgtgttaattaatcatttccaataaaacagtactctctggttatgttctggacttctagtctatctaatcattggcttatgttctgcagttacaggccacacactctctggttacagaactttcagccgttgctgccaatgaaagctccatgctcaatgagtatagagaactcttaggtaccgcggcagccctacaggtacgccttggttttcttgtccatatcattatctttctctgtttctgcaaggtcttaaggatttctagaaatctaggacaaaaaatggacttgttcctaatgtaacaaatagatgcatattcatatagaattataggctgcttcaagttgtggatgtacctgataccaaaagaaggatgttttttctgttcagtttaacttaaaccctaccttttctctgaacaggtcctagagtccagcctaaggacacaactcatacaagaaactgagtgaacagcttaatgcatgtatgtctaactaagaagaatagaatgtagaggtaacaccattcattagtttcagtagctgactgtgtatcttcatgctctctcgccccacttcctattcctttttttcccttttctagttaggtgttttcccatttcttcttttgtacttcctgcatgccccttttctgtctctacaatttacatggaagagaagtgcatcaacacgaaatcatggatcaatccatggtgacgagcctgtcaatgttttatttatagcggcctacaaactgaggacgccaacgtcctgaaactgaaaacttgttgtaaagattagctcttctcttccccatcttacccacattgccataggcattgtaggattatagtcttgtagcattttgtttatcacaggctgagatccaagcttgggcaaccaggagttctaacataacattgtagaatagatcatagttccccgattctgacttcatgaccaacatgtgtaactaactaattttttttatgagaacatataatcttttcttggtatcagtgcttcagtttcatgatttttctttctttttggttgcttccaacagttggtgtggaattgcatcagtaatttgactgtttggttatgctgtcttagcttctgttggtgcacatggaggcacattagcatcctgcctatggttttccaccttctgcatgcatcaatacgtccttgctgcattagtagtataattgatgttgattgctgaacataattcggtccccaaaagaattcactaggtcattctgctgcattgcttaggttgatggctagttaactccttttatttcttttttatttaattaatcttttgaccgtttggaggtggggcgcacgatgatagcgagacattggcctcttttagtctttggctgcattattataatcatttataacgatgatgctgtcatggagatgagtagctccttttattattttaaaatatttggtccgtggtggctatcatgctaccagcctgaacgaactattcgtggtacggtactgctctacaaaatgtccagttgaaactttaaaagtagcaaaataagattcttgattcgagataatcagttcaaaccagaatgatattggtacttctcatgcaaaaaagaagacaaaaaatcgcacagcctcttatcaggctcttgttgcaggcaaaggtcaaaatccgaagtaagcatttgacagtagatacatacaattactcttctctacagcattactgggaagggaacaaggcaaagcacaaacaaaatcgtgtgatcaaatatcaactacactgctatgggtgatacagctacaagcaaaccttcgtatcatcgattcatgcttctagtctcacgattcacagccagcttggtctgtgcaattcaagaggattcacagctccggaagtatcattctgcaatgctgaaatgacaaagtttcagcttcttgacgatattgatccttgttctgtgtgaccgtctgggcaaaactctacatgcgtggagttaaatacagcagcagcagccttgcatttaacagtacctacatgtcaccagaacagtaaataagttcctgatgagaatattaggactgttttaatatagaccaaaaaaatgggcagtataccttacgaaatctgagaagacatccccaagactttatggttcaatcaaacatttgctgagacttctgtctcagtctccttgctttcctccggttgtgctggcacaggttcactctcctctggttggtcatctgattggtcactgtcttctatcgcagtatcctttttgttcagctcatcctgctctttttgtatagctatcttattgggaacaagaacaagatatatattcctttcctgaaaatttttactttcttctgttgccatctgaaatatggcaaaaacaaaacgttatgtctagttgaatcagaacaggataacaacaagcactttggctaaaagtgtaaacaaaggccatttgagatgaacgagctcattgcaagcaacaaaagacagatttttgttcttattccatgaaggaaaaacaagtaaatctaattacctcaccgacatcattctggaaccgcctaagaagttcgatagcttgttttttatacaaattttccctgccttttaagtttaccattatcttgacctgaaagagtagtctcaagtgataagttacacagttatacttctcaaaaaataggaagcaaaatgaagataatcttatcaccttgtcgccagctttcagaaacttccttgcagctttaagtctcacactgtaatcatgaatgtcaatgttgtacctgataaaaaatatattgagagaagcccaacatcaccacctcaatgcataaaaacacacaccagttaatatgcagtagtctaaagaagcaatgacgcgaaaagatcattgttaatgccaacagaatttgtatcgctctattatgtgaaatagctcatgtgagctgtagaaaactccattcattattcaagcacttctggagtgtgcactttaattcactcattttctccaaagagcatacaggaataaagaagtcaaggcacatagataggagcaaacatagcaattattagttgatataacttgctaaaagaaatggtgatccataccccattttcagctctttcaagcccatgcgttttgctgcagagagtaaacatcaaaagtcatatgacctttacgtattagcaacaatgcctgtagataaaacctcaggttagaaagtttaccaacagatcttttctgctgagttcttttcttcttctgttgttcgtacttgtgctttctgtacaacataataaaagcgcattcaaatgattgttctagatgaaagaaatctgaatgagcatagcaaaggaccatgcatgccagtgacctggagtaaaagggataagattgctagcacaaaaattaattcactacaacgcatactagttatctaccaatacaatggacagtaacatgatggggaccaagcctattagtttattattggtacatggccaggttccatggtaaatatgtgaaaatgatgggaggcaggattccaacagagagcagggtaggagtcacagggcagcgatgcattaccacagaataattactaagttaataatcaattttcttacggcttgcacctttgacaccatcaggagcaaacttgctgagactagattatttttggtttgtttctcgcacaacatattatgttgtttagaacttaaaacacaagatatctaaagtgaattttaacatggcctagttccacattgacaaatagggtggtatgaagtaaacagattgtctgtcccaaaagacaggttggtattggtgttaattgcaacatacttgtaatctttctcttggaatagtcggagcaccggaggatctccatcgagtgataatattgcctgaaatgttacaaaaatcagcaatactcattggaaaagagttattcaaaacaaatgccacctaactgagtaagatttatcttgttaagcatacaggtagcttgtgaagttgccacgcagaaaactcatatagcaagcgatggaaacgccgttattcagtagcaggtaaccactactaatgtggcattagaagcataatttggtagtctcttatttaagatattaggcatttttaaccaaatgtgacaaaactagcaagtctttatactcagtagcacactaccaaattatgcatttttttctattgaaaagtgaatatttttagagtaattcattaataatgctatacacccacttgatcacataaaaacgttctgctgtgatgcatacaatattttggaaatgcatgttattgcagtgaagactataaacatatcagacaatgagcataccagtataagatcattttcatctgcaatctgcactgcttcgcttacagataccacaccaacctgcccgaggaacaatgaagggagtgacgaagaaataaacatacaaggccaaaaaaaaggacttgattgagatcgatctacaaggtatgccaaagtacataattggatatctggatatgtttcgtaccattcttttctcctcatccaatagcctaaccgttgaagccctgacaaagcaaagtagcttagaacgcttttacggtgagatgaaatgaacacagcatgtcactaggcacatcaagctcttttgcgtttaatcccaaaattcccaatccaatggaatgcccattctatgcaattgcttgggaacagcatgtatacgcaatttggcatacaaattctcgaattccacacatcaaatgccgaaaaagaaaagcataaatcccagaacccagaagcgagggaggaaggcgaatgcccgtactcgattcgctcgatgtcgagggcggggtcgtagtcggggtcggggccacggtccctcctcccccacccgccgccgccgccgaacccttcctcctcctcctcgtcgctctcgtacgacgacgacgaggaggcgttgtaccgcgccaccaccacgagccgcggccgcctggccatgaaccgcgccgacgacgaggagcaggccatggcgtggccgccggcggcgagcctacgagggacgacgcggggcacgcccggcgcgaaggcgaggccgacgaccatggccggcgacggcggcggcggcggcggcggcggtggcggagtgggtggccgccttatctgctccgtgtctccggtggaggtttttgccgcgagaagtggaaacgagtggaggtcgcagcctcacctcaggtttgggcgacgccacgggggagatggggcccatctccggtttttagttgggccacgggcccacaagcccaaacaggtccaatgtttcgctggctggattggcccgaggagttgtaatatgagccgtcacatttcaggtacgtacgctgctgggctaaaggcccaatgtgaatataaataagtttatttttggtcccttaatttgccgccgagtctgaaattcaaccgaaataccatatataacatgtccttcaattcctaaaaccgatgtgaaattatcctaaggcggtttgaatggcggtttcagctgacgtggtgtctacatggctggtttgatatggtcgtcgcgtttcaggtaagtgaagaattgtgagatgtaaataggcccaacaacatacaaaccaggtctattaatttgaagttactattggagttgtttaggtttgtactggttcaatgttgtcatgttgatgtagagttcattgttggaacttactatgttacaccgggagatccaagtgatcgagtttagtctcccaacgttaaatactacagagagagtggtacttaattatcgtctgataatttagtggtatttgccacattggcagtgacacgaaccaaccagatctctctctctctctgcactgtgaatgtgtgatgatgactacatctatctatctatctatctatctattcagcaagttggtcccaaatagtggcggatcttaaaaaatgattccctagtgtcataacgtgtctatcggtatcatagcatgctaattataattaaactatagtgttataatatataaataagcagtttaatcatagattttattgaaaatcgtcggtgtcatctgacaccgatgctaacactgtagatccgcccctcccaataatgcagaaatgaaacaacgtgcaaacaggtttgagaactttgaacgtgcgcggtatcagcagctgccgggaccaatcgcagcgggcgggccatcattgctggcgagcctagctatagccaagccgcgcgtgcgtacgcgcactgctgctctctccatcccggccatcgtacctacatgtttcacgaacaattccataccatatgcacatccacatcacacgtcaggatcatgcatgcccacatgtacccagcttgcaaataatgcaagcccccctgcaacgtacttacgatgcaaccagctgtgtgaccgtgccatgcattaaaaaaaaagaagaagagatttggagggagaaatgtccctccaaacattttttgaaaagaaattataagggattggacatcgaactttgagatctcatgctactgagcatctctgaccgtgtcatgcatggctcaagtgtgatatgcgccacgtaaactctccctgcttcacaagtcttttgctcgtctcaatttttagagttagattagatttgtatagtttagatatctattgtatacaaatctaatctaactctaatatcaatcaagcaatcgccatacatgtcaatgccaccaggagctatgtatgcataagttgccgatcgacttgcactatggagatcattctttgacgcctctgatatatgccttttcttataaaaaaaaacatagtacaaagacaaacactcacaaatcaaactagttgacctatatactcacaaatgccgttctaatcaacaataaccagcctcattggtcattccagttgtgatgtgttgtgacagttcaccggttgatcgatcaatcgatcgatcggtttaattgccaggttgcaatcgcagggggaaaagcctatttttcagggcctggcacagcatgcgtccatgtggatttgtccctctgttctgtgccgatcgagtgagatgaatgcgagctaggatgcatgtgtttgtgggcacacggcgtcctgtgctgtgcatccgtccatctcaaaaatgggttgcaacttccaggctttctacggcaattacaccaagcctacttactttcagactagccttcttcatttctctgaagaagctaaatatatgtgatctcaagagctagcctccatggagatagcgctggtattgattgctagtaaaaagcccgatcctagatatcctttcttcttgttatgatgctactatgttatcatggaactagagacctcaggagtgatgcaggttttgcagcttgggtgttcttcagatgtgtcatgtgtttgtttgatcacactcgattgcaaaaatcactttcaagctttcagcttcagatcaaagtagaacagtctctagtggctagtgctgtttactctacagaattgtacactgtttcagtgttttcactgctacatgggccccatcaaccagcacaaatctcccggggccccttgttagtgataagatcaacaagcagatggttctctctgtgcacacaatgcatgcacagatattgaatttgatggtccatgcatgcatatgtcggtgagaagtgaactactactgaaattcttgcattgatttttttcagaagaaaacagagcaatgaattggcattgaattcccgtgccaaacattgccatatcgacggatcaaatctgcaattctagtactatactcctacactactcctactactagaaatggaagcctcttcatcactgaccttggccctgtacaagcaaaaagcctcaaagcttcagctatccaaaaagttcagagataacctacctgcaggtccctactcctttcctcaactcatcacaggtcgccttcacttcactagtcagtagtagtactcgatcgccatcaattccatgcaacagctcgcattggagtgctagctacttcgaagcattcgacacctaatatcgccttagcacaaagcttctcattttatgtactagctagggttctactatacctgagatgctggcttgcttgtcttaatttgtgtatgagcctactggaagtgctaatccaacttgagctttgtactaatgtactactctttggtagcttagcttggcactaagcaaattgcacaatgcgtccaagaacgcaggtatccaagaacgaatcagccaaatggtcaagacaacaaggccatggagaaaaattaatgtcactgttttgctgttctttctctctctgaattctacagaaaaacagtgaggcagtaggcacacatacatactacagtgcaatggcattgttcatcagggaacagaacaaacataggcaattcttggcacagtgtgagtgactgagcaagcaggatctacctaggggtggtggtcagttaactacagccgtgtagtacagttcaatgtaaataaaagtgtgcagtgtggcgtcttggttcttggaaggggagaccctctctttctaggcgcccttaatcaatcaaacacaatactcctaccagtacaccatctgacaaagctcagctctaatcagagcagtaggtgagtgagtagttccatgcaagaaactgttagtccgttaatgacagtgcaaatgcatgcatagatccaattatcaagcttttctcaggaggaatcatcaccacattagtactctgctgtaagagacaagacgggcggcagaagcagcatcattcttatctgctgcttctctcaaggagacagagtatacgagggagttgatcacgagtacaggtaaaattatgggtacagtttgggccctcatcgcggcagccagcctgcagagatttctttaatttaaccgggtcaaattgtcaaaaacgtcatcagatcgatttgagctgtgacgcaaaatatatcagttgttttcagccatcgtggcgcgattattaatttgcccatccatctgcatgcatgctccctgtagcttgtcaagtgaagaatttgtgtgcagagtctgtctctgactaggtaaggtctcattcagaattcagaataatgcagtgatacaattttatttctttatagaaatctagatatgtagagttagaaaaaaaaaagaaattacccactattccctccgtccaaaatataagtagtacttaagatttatcctaaaatatataataacttatccactattagtaatatttttttctcagactaatcataatcttatctcatttaatttctctacttatataactttttatccaatcataatgtttcttcatttaggctccgtttgtttccacttaaaaaagtggattaagttttgaatattcatgtcacgttttttaaactgctaaacggtgtgtttcgtgtgaaaactttctatatgaaagctgttctaaaatattagattaattcatttttcaagtttacaataattaaaactcaattaatcacacgttattatcatctaattttgtgtgaaatacttaatctttatcttcaggagattcaaacaccaccttaatacatatgttcaaggttcgtaaagccaaccaaaactgatcggactccgtgaaaaagcgagatactccctccgtatcaaaatataaagtagtttggatagatgtagtatattttagtactattataaatcccttatattttagaatggagggggcagtatttaattaggaccaaggtaactaggctaatgacactgtttttacctgggaatgaatggagacaaattaaggatttaatttgcggcaacagaataggaagattcgagttgatcagtctggttgtcattgactcattgccatccggttacgctatcttgcatgtgaacctaagctatatatagctgcttgttgatgtccaggcagtgtccagctgcaaggacgacgaacaaaagctagctaggttgtttgagcgcgacgatagctgagacgggatggcatgcatgcgatcaattggttcttgctcattgcgacctccacgtatatgggtttcatcagatcatcacaccgctagatggggaagtattttctacactattatagaggtgtatgcatgtaatttaaatagttacataaaatttttataaaatttaataagatagactgtgataatatatataagacactatacaaacatttacaaacatgcaactttaaatttgatatacacatgaagaaaaaaaattaaaaaaaacaaattttatctgcgatgtacgatactatccactatttgattttactattattgtttttctagttgtagataaaaataaacttacatgcttgtgtatagactttgagtcacatgtaaatgatgggtgccatgatatctaggtgtagaaaattcttgtccactgctagatgacgacatgatttaattgcatgatgagagaaaaaagaatgctccgatccatgtatgtatagccagttgttacaggtatcttatggcttagctagctgaatcttgactccatttcttgctcattaccaaggcgatcgatctagctcatctcatcctgcagcattttctagcttagaaaaatttgcctttgtcaacgtcgttgcttgcgatcttgttttgactagatttacgtgcgtctgctgtccccatgccaatcacctacttagctacagtagtttttgtttgttatcttgcacatatctggtgaatacctaaacttttttatagcctttgatattcccaaaaatattttttaacagtactagctagacactcctataacctgtggggcgaaatgattcttttggctgtaacccatttaggcaaaatggtcttttttggccacttgacgaaacaacaagcaaaggtggtgtatgtggggcagccgttttcagaaccactaaggcatggctagaaagaaatgctactgcatcttgttaatcttgatacatgtagtatcaacttaccccatgagtcaaaaagaacattttagagcttacgtgaccttttgcctcacaatatatagtttatagagttcttttcccttttcttgccccctaaaggctacatttttatcccgctatatttaatgaaaatgcacggtctcatactgttttcccttaaaaaaccattttacaaataagttgcataacttcttatttattttctttgaaaaatttataacttatgctgcaatccatttttcccttttagagcaaagatcattatattaataatgacccagcttttggtaaaaagcccaagaaacatccatgtgttatatccacccaaaatactatcgatttaacacaacctatctaatttcagattcataatatttgatggtgttaaattgacactatattgttatattataatacagagtatattaattaataaccgttaccataacttttgtgaagtacttggtgttttacacgtttttttaaaaattttaaagtagaccttttgaaaaaatatttttaaatctgaatcttttagccacgctagcctgtttgaccaaataattctgtcacgccagatgtagctggcgttgccaaataactctgtcacgacacgcgctctaccaagccaccgtggttggcgtggccaaaaggttccgttttttaaaagatttatttttaaaatttaaaaaacaaaaggtctaaaaaataaaaaaaatccacatcatacggtggcgtgaggaagagagtgaatttaataagtgatgaagaggatctcaatccgatgaggagaggagaggttagcacagtgcagtggctgctgcactgggcactgccgcatgccgtagagcttgagctactttgcatttatggccttggccatctctccaccccgagcccgcagccactgcatgccctcctcctcttcctcctctcctcccccatccagacctccaagccctgcagtagcagtagcagctgctgtattaatggcgccgtaggcagctcactgcagcatccatcgccccaggcaatggtggtggtagtttgctctcttctccctcctcggctcagcccgagctgcatgccagcttaaatgcttccccagagcgagctcatctcgctctcgcccgatccaacgccgcatagctagctagctagctacctcgtcgctgcgttgtgtttgtgctgctgcattgcgacattccgatcggagcttagcttagctttcgtcgtcgcgaatggcgacgcgagggcggattgtagcggcggtggcgagcgttgtggtggcgtggctggcggtcgccgtcggcgtgaacggcggcgggtgcgaggcggagcgggaccgggtggaggcgctgccggggcagccaccggtggcgttcgcgcagtacgccgggtacgtggcggtgagcgaggcgagcgggcgggcgctcttctactggctcaccgaggccgccgccgccgccgccgccgccaccaagcccctcgtcctctggctcaacggcggtaagttaagtatactgttctacactgcacatttctgaattctcttcgacctctttctgcatgaataaatttcacaacgtccttaaattgattcgatccatgtacgagtagttgtatttagtatagtacattttgcattcgtgttcgttaattttgcacacgctggcaataatggggttcttgattggtcctaactactgtgctcaattaagtccaaaggtacagaagtagatggatcggtggtcgtgtactcgtgtttgaccaaaccgagaacacaacacatccattcctggagtcttttcatgagcatttagctatctaagcactagcttttctggagtttaaaaggatcgagagctacaagcaactttccagagcttttgacacgcactcctaggttcaaacttcttgtcatcacacgcctctctaacggaaagccacattctctttttctgagttcctctcaaagcttcgctccaaaccaaaatgcaagttactgtacatacatttgtgttctttcttcctgctagcttagctagtagctctgatagatgatcttgttgtctttgtaaaggacattgtgcgtgtgtgtgtgtgtgtgtgttcgatcctctaatggacacacgagtgttttgatcgagcaattggtagtgttactatagctagctgttttgaaggcagagcacagcgatggcacagtgatagtaaatgcagagaatacaggagagtaaatgtgtgtgtgcaaaagacatgaccaatgcctggctgaacaaacattagcatcacgaggaagtagagagtaaatgcaggggagaccgcgggcagccggcgccgtgcaggcggcagcagcagccgtgcactggtccgggcaacacgacatgcaacctctaaaccctttgcgtttttccttgtcacattgtgtaaggtactgtttagatcccatatcaaaatttttcaccctatcacatttagcgttcgaacacctgcacacgaagtattaaatataggcaaaaaaataattaattgtataaatcgcgactaatttgtgagacgaatcttttaagcctaattgctccatgattagacaatgtgatgctacagtaaatatttactaataacagattaattaggcttaataaaatcgtctcgtggtttactgaccgattctataatttattttgttattagactacgtttaatattttaaatgtgtgttcgtatatgcgatgtgatacggcaaaaaattttaccctgaatttaaacacagcataaatagaattacatgtatttatgtgtgagacttgagtgtgtgtgagagagagagagccagacaagaacaatgcttcgaaactcatgcatggttcttttctccataggtaaggataaacaagccctcgctagtactcctacataggggcaattaagcataagtaaacacactgactgaaactctgaacctgtatacttgcccaaaactgtcgagtcttatgccggatcatttgcagtttattcctggtaagtgtggttatgagcttgatctgtgggatattatcatcagccagccactagttgactacaactgtgtgagagaggcatatgttgtcatgtgtgtttgttccttgttcaagctgacgaattgtaatcctggcttttggacttttgacatttattccttggccaccaaatctcttctcttgtcctgcacggtgtactgtttttttttcccttttacactgagctgtgtagttctggtcattctttaatctttacagccagccatgttgccatggcatgattattcagtgtaaggagtctaaggagatactagaaaactgttcagcttaggcccttctaatcacttcattgctaaccactaatccagccttgcttagcctgcattaatccactctaattcaaaaatcgattccaagctttacagcataggagtactcctgttatctctctccatctctcattcctaggaggaaagaacagtctctgaacatctgcaatcagcgctagctgccgctgcacacacacacacctgagactgtgagcctgtgaatcgagcagcgtacagcggcaaggcgacagctctcacacctcgccccgcgccgcgatgatgcagagctcatctgctgctgattcagaattcttctgaaggccggccggccggccgcgagcatctgctgcagctgcagctggaatggcgcgctctgatgaatgatcccgtcgtccttggagatcggcgcaatcttagccacatcccacatcatctcatgtgaagtattagtagtaaatctgtagccaagccaaacactgtaataaaatctgtagccaagcactgtaaaatgtgtagccaagccaagccaagaggggccaagaaatgatgaagcctctgtctgcactgtagtagtactctgcactctgcggatccatactaccacaccatgtttgctagtgaatgagtggcacaaaagctgcagcaccaatttaaggctactatactagttttttttccaaacgcgcaaaaagattgcacgtcagtatattagaagaaaagagttatagttacacaatgcaatcagctagatcggcttatgccaagagaagggagaaaaagccaaataaaaagctgaagctaagaaaaactacaaaggctactactagtcatctttgattttgttattttctccctgtttgcaactcactcggccttattatgatcaattattattattccatttgctcctcatctctctggtcatcatcacacacatgcagagaccactgcttccttccctctggataaagccacaaggtacaaaccaaacagtaaccttttaccccacaacaactcacatttgctgcagcgtggctgaatggccgacgacctctgcattgtcgatttgtcattgcgagatcgaaacaaccacagctgcttgaattgcttgtgaagttgtgcttgcgtgcagaattgcagatgccttttcttgcctttggacttcattcttgtacataaacaaaggatttggagtagagaagataaaataaaagttcagatgagagagagagagagagagagagagagagagagagagatgcaagggcagtgggttcctctggcaccatggcttgttctctttgactagttattcattgggaatggggttctggagttgcagagcacgcctctgcgagaaggatggacctcttgattggattatcagatctatctcctctttttccttaggacttgcttgttttgggagatttggagcttctcaagtatatccatgctcattggagctgcatgtcatgtaaatagcaactgtaacatgaagatagcagtagtgcttactgttttactactagtatctctctgatagtctgatgttctaatcactttggattggattgctaattatcttttaaagttactgtagctgtagaaacatccttatttaactccagtaatatttgctgataatttcccaggtcctggatgctcatcgattgcgtatggagcatctgaagagattggcccatttaggattaagacaaacgggacagggctctatctgaacaagtactcatggaacagaggtactaagactaagctcagaaactcatcatgcctaatgatgcaatgcctgtcactgactgatgaacactttgttactgcagaggcaaacctcctgttcctggaatcacctgccggagttggcttttcatactccaacaccacctctgatctcaagacatctggtgatgagaggacaggtatgtaatctgaaatttactgaccaaatctgtcttaacactgcatcataaaatggcaaactgctgaatgttcccttgatgttcttctgaatgtgatgtgatgtgatgcagctcaagatgcgttgcagttcttgatcagttggatgtcccgcttcccacagtatcggcaccgggatttctacattgctggagaaagctatgctggtaatgtgtaaactggcgatgtttgcatcaccatctctgaaactattatctctgcatcatctgactactgtccatcaacaaaatttgcacaaattctaggacattacgttccccagttggcaaggaagatcgttgagttcaacaaggcctcaccatatcctttcatcaacctcaaggggatccttgtgagtattattaaactaaagtagacagtcctttaaatcaagcacgaacaaattctcaactgaaaactgtaaccatagattgcacctctggcaagagtttcagactaaaaacaaccatgcgatgatccttgtaagtaccatcaaacacaagcagaccctgaactcaaaacttaacccatatgttctatgatctctcacacagagtttcaggctgaaaataaccaagtgaactcaaacaaaaccaatccatatgttctagtatatcagaacacgagtttcagactgaaattaaccgtgtgagtgatggtgatcctgattttaccaggtgggcaatggggtgactgacaactactacgacaacatcggcacggtgacctactggtggacgcacgccatgatctcggacaccacctacaaggccatcatgtcgtcgtgcaacttcaccagcgccaacgtctccaggctctgcaaccgcgccatgagctacgccatgaaccacgagttcggcgacatcgaccagtacagcatctacacgccgtcctgcgccgccgccgccgccgccaacgccaccggccgccgccgcggcaaggccgccgtgctgaggttcaaggacaccttcctacggcgccggtcgttcggctacgacccctgcacggagacatacgccgagaagtactacaaccggccggatgttcagaaggccatgcatgccaacatcactgggattccttacagatggacagcctgcaggttgatgcatcagctgacatttttttttcttgatatttcttggcatcactgaggttggaattgggagagtttaacaatgcatttgggttggatttgacagtgatgtgctcatcaagacgtggcgagattcagagttctccatgctgccgacttacaagttgctgatgaaggccgggctgaggatatgggtgttcaggtgagctggaggacctggaattggtgaatttatccttttggttcagcatggaactagttcttcagagatcatgagctatttgtcacttgatgaaaatgcagtggcgacacggattcagtcgttccggttactgcaacgaggtttgcgcttagccatcttggactgaagacgaagatccgctggtacccttggtactcagctggacaggtagtgaacaatctccattgctgtttgtcagatgcagtttaagcagaaatcttgtcactttaaagtctgtaacttcatctgcaaatggtgcatctgtgtgtgcaggttggaggatggtctgaggtgtatgaagggctcacatttgcgtcagtgagaggtgctgggcatgaggtgccactgtttcagccaaggagagcattcaggatgtttcagtcgttcttggcaggggagccattgccaaaatcctgatggtttcctgccaacaactgatgtctagctacaaagtctagaaatctgtaaaagatgcttggtagaggtgcagtgtagttgataggtgaggagtgtgattgattggtgttgggaaaaggataataagagaataaggatggttgtgccatggaaaccatgggcatcgcaacaaggagctaataaacttgaagccttccgctctgtttaccactaaggttccatttggattggaggaatttcgctggaattttagaggaactgaactatttcctgtgaaaatcctataaaattcctgtgctctgaaggaaccctgagcaattatctcatcgaaaaagaatatatcatgtacgcaattcaacgcaaaagggagccatgaagtaatttgctgaatatagccatgtatagtgtcaccagtaacggaagtacctttatttatcatgaaaataagttccctgacatacagggataacatgcaaaaacagggcagctaatctctggattcaatttgcatctcaattcacaaaccggatattctatcacttcgataacatgcaaaaacagggcagctaatctcttggatccaatttgcatctcaagtctcaaaccggatattctatcacttcttctataaaagtaaatgtaatacctttagatgactagagaaaattcagacattaaaaccctcagctcggaggcaccgcttgtgagcttcgatccacttggtgcacgcagattccccatgctcgacgatgcactcgtctctcagcctcttcgtatcagggcacgcacagcatatcttcttctttggctttgaatcagtagcaggagctggagcagccgaccccccttcgctcacagttgggcaagcaggtgactgcgcaggaattgggtgttctgtgctacccatcttagcagcaggttttcactcagtatctgcacaatgaaatgaggaggcaaaagggcaaagggaacatatcaaataatcaatctctctatgaatcaactgatagtcttgtaaatctattactcccccggtccaaaagtatagctagctacctatctttatttttcttttcggaataagaaaatatagctatctatctgaactaaacactgcggtaagaaacatttcaaagctatgaaacagaagatcaaggaaagcctaaacatcccaagagtaaaatttcagcactaattaatgcctgctatgctactgatgtgcagaacaatctgagcactagttgtagagctagtaagagatgtgcttctctcggcacatgtgtttttattaaaaaaaagatcagtttgtccttattttacactccacttttagatgctctgcattttttttaaaaaaaaaggatgttccggaacagtattgctgaactcaagtactaataagattgcactatgacatgcgtagtaataatcaacaaaaggtctaattttgctgtttgcttaagataaatagcacaatcaaaccacataatgtgtgggggaaaaatccattattttcatgaaaactaatagcaagaaaattcttaatcccttcatcatagatagtccataatgctactacatttacggatttaacattacaagcaccttcactgaatcctaaaggtaacaaaatcttcgcatctgcacaggtaaccgaaacaaccaccggaatcatcacagttaggcatggttggatcctaatcggccaccgaatggtcttaccgcatagagatcaaaacccccatcccggcggcgcgatccacggcgcgactaggaggaggggaaaggaggaggcgcgacgcgagcgtacaccgagccgcgccgcttccaccgaagagagagagagagagaggagggagggagagggaagcacttgcctggacggaatcggagcggggggggggaggaagtccggcgacggcgagcgctgcgccgccgcgtttgctttgctgcgccttcgttggctgtaaaaccgcggcgagtttttgtttgcggggcgaccgccgtgcgcgtgtcctccgcttctaatggccggcctcctcctcctcttcttcttgcagctcaagaaaggaaggaaagattccggcccggcccggcccaactaattttccgccgacgaatactagtatattgggctccatacaaatgaggccgcgtgaaaaagagaaaaaaaaaggtactccctccaatttttctatactagtattttcaagatttttttctttgtgtcatatccagattcatagtagacgtctttctttcgatcctatccagtattaagttattatattttaggagataggactttgacattgcatgggagtcaaagtttatcttaccctgcaatagtaaccatatacttccccccttctaaaatgtaatcatgtctagatattcttcagaaaataaaaaaaaaatagtgaaatcctctagcctcatcttttcgcttatacttatgcttatcagccaaattttgaattttcaaccataaatttggagctggttttgaggttttttcatcgaagtttagttttcagcctttgcttctagattgctaagaatatgtatataaaagttttattcacaaattaattttagtttccaaatatgccgtttcgtttattccgcgaataagagaaacaatggctccggatggtggaaggttgtggttgattgagatatatagaaaattgatttgattaattgaaataaattattttagtatattctagaagcttctttgtccatcaaatgactacacaccgcatcatatctctactattataaaaattgaagatgtttttatggtattttggtacgtcatccatattagagtcggtttttaattaagttctttcattttttaaatacatatctgtatttgagttggaattttaagcttgtttccttttggaagtataaaaggagttgtataagagatcttttgaaaaacttgcatgctaacttgagatgaaatacatactcttaattgaagctcatgattttctaaaaaaatatccaagcgagttcccacagtgaattttaccctagctaaaccgtataacaatgataaaattaaaatagcaattacccgttgcaacacatggatatttttttagtaatatataatattgtaaatagtatactacaaatataatgacagtttagttttacgggcaccgttaaaattgtcaattaagagaacggggtataggaaaaacagagaaatagaaaaaaaacgtaaaaacacataaatgattatttgattggaccgcaggaaaaaaaaagaaagataaagattcaaagaaaacttcccatgagattctacctcatgccaaattttctccaaaacttttcataggaatttcataagatttgataggattcatttcttcgatagaaagggctttaaaaaaatattctataggaataaaatctttcgaaaatttctatgaatttgggcctcgctgggaaagtatcctatcctccagtgacgtgcagtcgttcgcctctgcatttgtatacacacacttgtgtggtggcatccgcagtggccaacatgaacaagtaggcatcagatacgtgttcaccttacactcctgacgtagacacatcatagcaatacacacacagaaatggctgtgctctcgacagaagcatcgcgatttctcagtcagaaagttcccctgttcagtcactagcacagcggaaacgttacgattcaggctattgtcgaaatatttatgactcagattatcccggggcacaaatcaaaaggaagagcgttattccacatttgacaaaagagaaaagggagagagctacacggcacgaacagacttgtcctggccaaaacatcttgtgaatgtgatgatgatgatgatgatgatttcaccaaacaattcgacaccccaactgaaaaggaaacgacgatgaccagttttcttattctaaattgcccactaaacttttgtatatcattggccctagctggccgctttgccaccaccaaactcctccgaaatcctcgtgtcatctcatcctcagggggatgagaatgcaagggaataaatgatttaagatgagttcttgagaacccactcaaccagggtggagacgccgaatccggtggccgcccgcttcttgtcgttccacactggcccggccatgtcaatgtgcatccactgcaccttctcatccacaaactgcaaatacaagcatgaggctccattagcatgtcactgcttacaactttattcaaatgtgcctacctagagcatgtggctgtgtgttttgcttgaatttcattcataataaagtggtaaatttacctgtttcaggaagagtgcagcagtaatagaaccaccctgccggccaccggtgttaaccatgtcagcaacaccagacttcatcgactcccagtagctttcctcgagtggcattctccagaacttctctcctgatatctcagatgccgcagcaacttccttagctagttcatcacttggcgtgaaaattcctgcacaaaatattcatttaagcaagcagcaatcaaaggaacacactaatctattcacttaatggagaagattgcaagtgatatgtgattggttaatcttaccagcaatgctaggcccaagtgcaacgacacatgcaccagtaagtgttgccagatcaataatctacatttgacatttaaagataagtcagtacctcaaactagattcgtgagggacatcaggccataagataaatcacatttccataaaaagggcctagaaataaatagcatacaactatgctagggtgatgagctgagtatcagcattataactaaaaccaacaatgccaataaaatatcttgcactaaggtttaatttatagagaaatcatcaaagcattaaaaaaaatcagattggtaatcatatggacagaacatgacaccataaaagtcattaccttgtcaacaccttgattacaagcgtacaccaaagcatcagcaagtgtaagccttccctccgcatcagtgttatttacctgaagaaaaataaatacagatgaatacataagcaaacgcattttttcacactatcactgatttatgttaatgaatcatgattcctagtcttctacaatcatacgcattgtatcacaacaaacatacctcaatagtcttcccgttagaagcagtcacaatgtcaccaggtctcatgcctgtgccactaatcatgttttcacaagcagcaacaataaaatgaacctctactccagggggcttgatttggcccaaagcttttgctgcaccaaaaactgctgcagagcctcccatgtcaaacttcatcagctcaatactgcagcctggtccagtcttaatgttgtagccaccactgcaaaaaaatcggttaatcaattgtaagaaccaacaattatccatataaaagatggcatatttatgttacacaatgatgtatgttactgcaatagttcacaaaatatgcatatgtttcacaaacctgtcaaaagttagacccttcccaacaatggccagctttctcttggcattcccaccaggtggtttgtagcacaagtggatgaagtggggaggattcgcagaagctgcagcaactcccaagtaggagcccatctttaactctttacatttctccacatctaatattgtcgcagtgaatacatcactgtatgtagaagcaatgtttgatgcctcctcggcaagcacagctggataaaggagatgagtgagtagtgaaataagaaaacatcagaatggcatctatggaggagatccactgtttggcgtttaacaaaagaaatataccaggagtaagaacatttgcaggtgagttcacaagttctttcccgaatatcacacccgaggagagatcattggcatacttaagtttctggtcaacctctggaccagaaccaaatccgataagatctacttgtttaagatgcaccttcttcgactccgacttgtatctgctgtcctcgtgcagcccaagcacagttcctgcaatccagatacagataaaattcagcatcaagccaatgcatcccacaagatcacaacaattccatgaaaggagcatcaagatcacactacctgaagcaattgctgccgcagcagtcagcttaaaatcttcctggatcccacccactgaagcaaaaacaatagccgcgctgctagcttgagcagacttggcaactgacgcgacggattcgccgatgcccttgcaagccgttgtggtggagggggcgttctgcccaaggccgatcagacccaccctcttgaaaccctgccccgggaggcggagcaccactgattgcccggctttgccggtgaaatcctcctccgccgatgcctccgacaggaggccgccgagctggccgtcgagcttcttcaacaccgcattctcgaatttggagtctgatcctttgaccagatcattctctgtcactgcgattgcgaggatgtctcccttccattcggagaattcgacgtctttagcagcaaatgaaacctgaaaaaaaaacagtagtgcacagattgagactgagctcacttgcaacatcggcaaatctaaacaaagatgcaaacgtagtttgcgtaggagatcactagttcgatctcgatctagcagctcgagagattcgataacgagtcgtgatcaagtcaaccaaatatagcagcttcattttaccacacagatggggagttcaggaatctgcaacaatcctaagcaccaagcaagcgactgaacctgaaattgaacccgaaccccatcccgaacacgcacctgcggcggctcgacggcgttgggcttggtgagcccgagcgcggggcccgcggcggcggcggcggcggcggtgtgtcccatcctagcgcggtggccgagcggctgccggccgagggcgacggctgctgcaccgtacgacgacgacgacggcggcgacgggcgagaggcggcgagcgccgcgcggggtaaccggcgcagcaggcgcggcggcgcgcggcggacgaggaggcgcgatgcggcggcgacggcggcggcggaggtggatgcggcggtggccatggacgcggaggcggaggtggatatatactagccgtccgatccgaaccgcccttgtatgcgtcacccgaaaggatacgactccgggaaaaactccacgcaccccgaggtcaacacttgttttctgttacgcccactgacatgtggtgcccggaggagtagggggctaggggccctcttgtcattgtcagttggcgataagaggatagtagcttgggtttcggggatgaggaggagaccgtagtgtacggtggcgtagagctctactccgtagtattttttttttaaaaaaaaaggaaaactagagtagagctctaggatgatgagagtttgtttgaatttatcgattggggttcggttttacgggaaagtgtggaaatccggtgatcgattcggggagggaccaagctcaaagaacaaactgaagaactgagccgcgagaagaaaggggactctcgagagggaagaggttcccctgactttgatgcactaatatgtgagtccaatagatatatggtccacatgtcagtgacacaagttagagaaaagtaagttagatgagcttaatccctcttgaaagtcactaaggacataattagaacaaaatgaatgaaaatatctcttgtttaatttatgggattgtctatagatcatttgacaggaaacccccttacaaatcttgcaaattttagaccacccgattgctttaagattcgtgcaggcaaccaaaccataaaaatcctctctcctctcccgattcctcacgccgccgctcctcagcgcttccgccccgcctccgccaccgccaccgccaccgccgcctgagcacgccaccgcccggcctcgccggctggccgaaaggtgtcaacggcgtcggcgaggcctccgggccggccccttcaccctccccctccctctcctctcctttgcctcaagccggcagcggcgagctgtctgttgtcttccctgtcgccggcggggcgccaccaccagccgcctcctcctaccactctttccgttttgcccccgccgcccgctcccgacccagcagctacggcgccgccgccgctgcctcgccgcccgctcgatccgccgcccaccgtcgggctgctgcctcccacagccatccctctaaagccggtgaactccccctcttccccctcccctccctccctcccacccccaccccaccgcaggaccctaattcgtcggccctctgccggattttgggttcgctggcgcaggagaagaagaggtggacgccagagttggagaagaagagcatgaatcatgaagcacatccagtgatccaaaatttacaagatttgaggttctattttctgtcaacagaagtttagcatttccgttaattttttttttactttggatcgagtttaagctaatgaaaacgtctaagtttacattgaaaatagatgagttataactaaaaattttctttactggttccttggcacgccttcatatactctagctttgcccctagaagtcgcacattgattttgttagctacgagagcttataactccttgcaagttgcacataacataagaatttatggaaaaataacatgtgtttctaaggttacatggagtagttgttctttttttttcctttgagattcgtatgttagtagcatcacggtgatagagtagtgggcgcatggcttcatctagcagggtttaaatcctagtgctcatgagttttatgcatatacacagttatgtttaactatttgtcttactaaaaaggggaaattacaaaaatcaccccaaaaatctcttgaagtttgatattccactccataagacattttattgtaaatacccatcctacttagttttattggtaaaaccaccccattgcacacatgcttaaccaaataagtcagttaacgctgatgtagaaccaccataggttacggaggtcaatcttgtcatagtatttacattagatttattcttatatatttcattgatttctttcttttttttggcatatagcaaaactcagtgcaacaattttaaagctcccattagctattctatatatcgaatctcataaagagtgttaaaactatactcttataagtattaattttatgtaaaaaaaacatattgacggctcacaatttatgaaaacatattgattcggttatgcatgtgtgcactgtggtggtttgcaacaaaactgagtagagggtgggcatttgcaacaaaatgacttatgatgtggtttgcaacaaaaccgagtagtgggcgggcatttgcaacaaaatgacttatggtgtggaatgtcaaacttcagacttctgtggtggttttacaattttccctattaaaaaatagtaaattgtatttgcaccaggtaaaacgcaccatgtttcactttataccaggtttaacatataccttcactttgcactacattgtcttgaaataaatttcacttgacactatcatcaaaccataaaaaataatgaaattttataatatctaaaagcaatgttgtcaaacatagtttaaatttaagaagtttcatatgttttactcatatttcgatattctctgatacaaagtgaaaatatgtgttaaacctagtgcgaaataaaacaaggtttactctaccgggtgaaaagtcaaacaaggtgtatatactctacctggtacaaagtacaatttactcttaaaatgatatataactattattaaatatgttttaagcatgacttatatttttattttatagttgcataaaaaataaataagatgaatgattaaaattcaaaagttaacagtgtcgaacattaaaaataggagggagtaccgaccaagcatgtgattcacagtttgatggattatgatcgattcatagcacctgacaacataactgataaggttcagagcatttgtctatccttccagacaaggaggaaaaaacaagatacaagctgcctgttccacagctccagccagatgaatgaatgatcaaatggccacacattccatttggaaaaatattgttttatttgttctacttacagtgttatacatcgtaatgcacaaaagcatctctacaaatgtacatattttgcgggcacaaacattgcaaaatttgttcagcaccagggaaccggtgagttgcatagctgcactttcctatgtacagtaagaaccactgaaccagtgaagctgtatctgtattgctgtatagtctatctgctaagtaaactgtcatattagcactacatagtgagcttatatttgtctttctccctctgtctgcagggcaaaactgtaagaaccaatagtagtccaagcatatagggagtaacttccattgatgtacctgtcatatgtgctaattttcttcacctccaatttcacatggttagaagcttcgaataaaccgctacaaaattttctgccgtactgtccttggtcatgaagctaaggccgcaatatgaaacggcaagaaatcaacgacaatgcatactttgccaactcatcagaccaaaattcatggctccagcaaatcctccttgtgagctgctgctttcactttctccttttctgcttccatctgggcccttttcttctccagctccatctgtctgaggttctcggcatgggcacgctcgaacgttttcacgaagcttagcaaagtagagacaactgtccacataaaaaggtcaggaaatcatatagctgctgcagatatccaaaagctaactggtattaatctgaagatttggtggatgcaacaattctagtatctatcatggcaatacaagttcactaaggaacaaagcacacaaagaacagcagcaatttggatgattctggtaaaaccaccagggacccccagaattgtatgccccttcttagtttgattgtacaaccccaaaaatggcaatactcaattactcctaagttatccaattgtgacaggtcataccatggaaagaggaatgcagtgccctctgtctgaaacatgatgactaactcaattatcatagcacctttcgtcacatgccttgcatataaatacacgtttcccattcccttttgtatcagacccacttatctttgatttgtacattttgtagagtagttaggaatattaattaagccttatatataaaaataaaataccttgttcaaatggacaccgcactggatcttcaccaaaataatgtgctagagaatctgcacttttcccctgaaaataaaataacaaaaacttagtacaaatacatgttagaagacgtatgcagcaaggtaatgaaactatttatagtctttgcataccgcagtactgtaaagaaaagctaacgatcttccttcagcttgagcatcagcaagaaattccttcaatttctgaaacgaaagctcttttgagtattagtattacagttaataatatactaacagcaaaacattgtgcaatgatagtcaactaaatgactaactgtttcagttatgggtgtcgtcatgtttgttcttatccatccttttatgacaatttgcaaactattaatagaatatactccctcaattccaaaatataagcatttctaggtttttttagcaaataccaaggttaagggaaaagattccctttcagtcacctcagtggtcaaattttgatttttgaatcgcttagattcgtctcctaagcacctgattggctaaaaatgtatggatttccatggaatcagtgtcccataaaatgcttatattgaggcacacattttgaaccctagaaatacttatattttggaacggagggagtatctataaagcctatgtactgatgaagtacaaaactgcaaaactgcaatcaagtgttatggtttccataatctaataatacaaatggagcagtaaggactaaattgttgattcatgttcattccctttagtatggcaaaggtctctgatcaccttttacttttcacattttgtcactatccctattgtagtgtaactcggaatctttgatgatgagttttacataagaagaatactttgagaaacatgaaattatatttataatttccagttccaacaactacatccacaaggaggcaacagagaatcaatgggggaagttggagaaccaaataccatgcaccattttctcgattgtaatcagcgaaaataaatgagaaatttctgctcatatgactaacaataaaatctcaggcaaccgaccttgtaaaatatctcagaccctggaccatccttttcagatgttgtcaattcctgctcaaccttttccagtccctttgttatcgcttgcatttcttccgccaactctttcaattgaatctgtgattcaccaccacactataagcaagcaaaacaaagccaacgtggatctagcgttaattaatatatctaagttacctttgatgcaggttctaaatatgtgaggtccttgttaaaatcaagaacttcaggaagcttgtcagaaagaacctgcgagcgcaataaactttgagaaagagttcatgaaagtgcatacttatctgagcttgccacaaaagtatcaacttcatgacaaaatatcaatgcaaatatactggttataaaagcaaccagtccaaacttacagacgcagattcatatctactttcgtcatatgctcttgttccctttttttgagaaagactgatatgatatttgaaacatgggaataaagggaagatgaaaaaaaagggcaatacagtcactgctgtcctgctcacagctgaatgcaaatttttaatgagaaaccactgtatgcagttggtcaatgtactgtttctaaatggaaaaagggagcttttagttttagataatctttctcttcctactgtaatgaacaaccatcaataatacaatcacaatgatactatttagacatacccttgatagatcccttctctaggtctaactcataagaaatttagtatgtggaacttctattgctatgcaccagtaaattcccgcaaaacgagcaatgctttcataactatgtggttcagtgacacttcaaaacacaaaaaacgatgggattactgaaattaaatgccataccttgcataaataatgcatgagagtcatcctattattacgtgcccgaatatcaatgagtttaagaaggctatccaatctaaatccaacagccgaccctgaaaaacaggtgtttgtgagaaaaatatgaaggatataatcaacagttcgctatcaatttcatgtggttaagagagatgatggttcaggacataatagctatggtgaaattgaacatgctgttttgaaataagagcgcaggaattgcagttgtaaggtcttcttcctgtccataaatcctagctacatcttcacccgtgacaattgttaaatgctcgaattttgttttaaccaacattttctatgatatgaaaaaaatgatttattggaaaaaatagaacaagatttttttttttaaaaaaaagagaaaccatgtgcactgtatttcttcatgttggaagatcaatttgcaaaaatcatatcgtaaacatatcaatcttagaacatacttaattactcaccccttgcagttccttggtttaatgcatttcccaacgaaagaattgtttgcatcactcgcttaagcttaacagagttcctaacctgtccaaataacattatataacagcatgtttaaactcgtcaaacgggaaaaggttgaggacttgaggtcatattatataacagtgtacctcttcagcaacagaattgatagtattcaagctgtttttcagatctgcaacctgaaagaatgcacagaattactcggcaaaaaaattaaactctacttatctatcagaacagttacacaagttcactggggaaaaaatgatgcaaatattctgctgacctgtgtaagaaacttaatcttaaaggataagattctcagttttgactccactcttgggactttcatcatttccaagaagaactacaattacagaagcaagtcagatcaagcctttgtgttcatgcatgagattaagcaaaaaattaatagtataactgctggtacaggctaagcaataaacaagctatatatacataacatggcaccgggaaaatgctgaaaaaaatgatcatcttattagctactccactacataacttccaagaaacatccaaacatgactgggtgagatagttggttgtatgatctcccactaagattgtgtatatcttgggatgaactatgaaattcattattatttacatagttaccgaaaaaacaaagctcatcaccaacaaaagatcaagtagaaaagattattagtgacctgttcacatttccctaggttctctttgttgcctgtaaacccctgaaaaagtaggaggaaaaaccttaatcaattagcagaatacagaaaaaattccactggaacagacgcagtaagaatttcaagagtccaatgatatttcaaagagcaatctgctgagtagatatatactttgagtagttccatttcttccttagttggacagaactttattagataatctacttgatcaccatcaacaatggaatcgtcaagtgcaagcactgagttctgaaaaaaaaggaaccactattatcaacagaaaccactagttcagtacagctgccaaatactttatgctcagtaacagttgcaacaataggtaactaatataacccaaaccaggtttaggaagtggcattagtaagattagctattctagtctatcagcaagggtatgcatcaactatgccagattacttttacttttcaagagccatatcccttcaacaaaattgtttagttcgttaccatcagatctggtaatggcatcttaatgtttctcagcataatttcacaattctttgagcgctgaaggtcaatctgcagaagaaaaggttaatcttgtttacttttcacttgaattttctcactgcttgtgaatatttgcagtaaggaatgtgaagtataagtaccaaaagaactttttcttgtttcgctgcaacagaaggacgttggcgtgcccgtttctcctccatgtttggcatggctaccgagaaaagactttcaagttccgaaatatctatctctggggttctggtgaagacataaatggactaacatgttatagtgctaccattagcatttacctggaaaataatggcataaaatgtttggaataccttgatgcttcatcagacttctgtgtttcagcccataagcttccctgtgtagctcttgacactttcacccagtgcaacggcttcaatggtgtcctcttagatgactggttgggccgcaaacttctaggacttctggaccgggctgtgctacggtcctttgcgccaaatgagaatgtaggaggtgggggaggagatgaactgacaacattacccttacttggcaaagagttcgaggaattcttaggaggtgggcctggtggaggtggtggtggccaggttatcatttgctcttgtgaaggtttgctggccccaactagcttcggaggaggcaatgggggtgcaggtggtgctgatggtgcagaagtgacatgagatgacctggaatacagtggtgggggaggtgggggacgaggggctgccacatcatttcctttccttgaggatggcaatgaagaaaccaatgagctagtttgagatggaggagggggtggcggtggaattcttttacttgtggatggaaatgaagaaaccaaagagttagtttgagatggaggaggtggtggtggaatgggccgcgtttgcatccctggaaccattggaggaggtggaggtggaggtggcggtggaacagctggtgcttgctgccctggagctgctggaggaggtggcggtggggtgggtggtgttttcatccctggaatcattggaggaggtggaggtggcggcggtggtggaacaggcgatgcttgcagccctggtactgctgaaggaggttgcggcggtggttgcggaggagaaaatgatgatacgggaaatggtgggggtgggggtggcggcggcggagggggtggagctggagattggcctctctttagtggtgcagaaaccacagatgaagtagatgaatatatcgagtttgaaatcaatgttggttgtattggcggtggaggtggtgggagtggaggctgagttggtgcagccttttctttagtgcttgctacctctttaccatatgacaaaggaaacatcacagtagatggttttagagggggtggcagtggcggcggcaggggtggggatgctgcagttgaaattgaaattaatgaggtccgagtgtctgaagtcagaggcattgcaggcaaagcttctgggacatatgttcttgtactgctagattccttttctatggacaatagagaatctgatgacaatgcagtgacactggaagctctagaaaattcaggtggaaacttctcaaggttttcacaggaaggttcttgagatttaactagctcttcatttcttgcaagagctagtggagaggctgatgattctggaggttgtgaaggggagggcatgatcgatctaagggaaacgctgattatacttgtactagtatttatgggtaaaatgggggaaacaggggctaatgagacagtgggcggcggaggaggaagaggcggaggtgtgcacaaagctatcaaggatgcggtcgatgctgaattatttacggtaagaggtgaaggttcttggtttactggagtttgtgaaccagagttctcagctgattttgacgctgactgtgctggtgcaatttgcactgcagaatctatcagtccctgtggctgaactggtgaggacggtgcttggggtattaccgtgcttgaaggtagtgccattgatgaagcactggtctttggcatcttaaccttagtaggtgacaacagcaccgatggaggccttgttcgtgaaggagctacttctattgtttgtattttggatggaacttcagctgaggttgaatgtaggggatcttgttgaagttcagtgcaaccaaccataacatagtcatctgttaacttcaaaacaagcgaagacgagctttcaccagagagactatcaaagtcaagttcttctttagtatcgaagaaagtctcggacccatcagcaggagattcatctatatttccttgagaagtggatgatgcttttcgttgaggtatgtgaagcgaagtatccttcttcccatccaaccagtctaaatggttgaatatatcaagcaccttagcaaactcttcaataccaagtccttgtttctcttgatgactaaccggctctgttgtgatgtgtgaagtagttgcatccatatcagagaaaataacctaacataatagaaggtgtatttaaaaatccatgtataaacagaaatatgctagtttgccacttggtataaaacacttgcctcagctcgaaaatctttagggaattggtcttgtgtgttccataaaatgtctatttggtcacgattaagcatcaatatgtttgacctgatgaaacctgtattgaacatgatccggaataccatgtcctcacgatccagatcctcatacagattgatacattctaggacaacatccccttggacatgacattgaaggtttattttcaccagttcatctgcctaagatcataaatggttagttcaatttcatgaaggttagaccagaaattgtacaaacttcaaatataatcaacatagaaccctattaatgatacagcgaagtagttttagctatacgaatgctgcaacgtacgtcacaacgcgtccacttcaaaacaaccacaatgcaagaccagggaaaagacaaggcaattacctgtgaatagaaacggacaacgttgcttctctttggagtcgaaaaaagaactttaggagtctgatcagtaggcataagcggatctgggccatatatcctgaatattggacggaaaccaccttgaccatgaaaatctggaaccatcctcaaaatcacagaatctaacgtcagggctctatcagctggaggccactcaggcacgacattcctcatcgaaacatagcgcaagtatctcaattgcgacggcatgggattcagaggtgaaaacatctccaagagctctactggcgattgcttgtaaagcatatccagtgttttctgctcatcagaatactgtcccaggtatatcaggagagcagctaacatgaaagccagaataggccagcatccttgttcacagtgcattatcagaaagttacgctgacccaaagagagccagctttcgctcgacttcaagatgcagtggaccatttccatggtgagaagtggacacccctcatagtggccagggtagtccaggacggtcataccatactcagataaaatgtgatatatggggctttcttcatctcgaatgccgaaattcgagatcatgaatgaatgatcaccaaaattatctagaagatgtgctgcaacacctcttatgtgggcttcaaaatggtcttcttccatctctttcatggagaagcaatgatcaaaaactgaaatagataaaagctacatgtgtcaagcatcctcaggacctcggctctattttgagttcttttatcttcacacagttaactaatgaacagataacgaaagtatgaaacagttcttttggaatataacacaactttttagggagaatataacataactgaaacgattaaccattcaaattgcaataaacagacaaaaacacaaatcttccaccactacattacgtataactctcatggccctaaaagtctctaatccatattgtgatacactatactaccaacacttcagaagtgccaaatcttaattcaactatgcttaaattagcagcctatccatatcaatcaagctgaaaccttttcaaaagagaagctaggttggatgaatctgtccatggtaaacttggcaagcaacataagtcatggcagtgcaaaaggaaatacttccattaccgtatatgttgtccgtgattagaagcaacccatcgggcggtttcttgaagaagaacttccggaacagcgccatggcgcaaccaaatcaagagctccaatctgcgaaccaatcagcgggaaatccaagaactcccgacccgtagcgacggatttgggtcaccaacttgcaatccaccccaagaagacgctttttttgagaactccactttagaaaatgctccgcctttgaggattcgggcagctagttgcagcattagaatataaatatcgcggaaggaaacaaaaaaaaaaaagaaacgctcgaaagctccgagcaatcttgttgcggtgagctcctaattagattagggccttggaatcgaagcgcacggagaaaaggtggtcgcttttgttgattctaggtggcgatatgggaaatggcgacaggaggaggaggaagaggagaagaaactcaaggaagcaggaagacgaagcattgggcgtttgactaaatttaattatttttaggcgcagctgttaatctgctctttactctacccctttcttctaagaatttattattattatttctcccatttttttatttggcttgtcaatgaaaaaaattgtgcttggtttcaaaataagtattttaggtcaacttcatggaaaacctacccaacctgacaatctttactgatggtcaatgtgcttgtccaaaaaatcttgaactttttttttaaaaaaaaagcaaatataatggtgcagtaaattacattttaggaaggttttgcatgataaatctgcttactgtttgttttaattgtaacattagttattagaaaaaaaaagtcagtttcatcctcctggggagagcaagctaagcatccgttgctttcgcaattgttccctttcagatttcgtttttggcttttttgtgctggctgctgggttctctaatttcttttttaagggttctctaatttctacgccaattaacgtgactaggatgattttgttaacagaaaaggaagatgattagagagtgagtcacggtgatttgggggatccgggtgggggcggcggttggtagttagcatctgccgccaatttcagaacaagccacatgctcttcagtccttcaccctgagcttgtactagtaatcctgtaaaaaccaaattcacctgaaggtttcaaccgagctgcaagagattagatttaaaaaaagagagagctttacagaatctttgtatctcctagcaaaagaaaaaagaaaatctctgatcctaaactctgcagtgagatagttttcatgtgctggatcttgatcttgactcatattaggaagcattgacactttgacagtaatctttatcaaggcagctgggagctggagcttaagatggccggtggccggtgtatgacagcaacaatgatcatgagacttgagagtagttattagtattaactaattgtagcctgcttcagtaagcttgtgctgcgcccaaaggggttggaagcacgtcacctgtctgcaatctgcaatggatttcttttttcctttggcatcttctcaagcttcctactactactccgtactagcacaggaaaaaagcatatatgtaatttgtttctttgtggttgctgattgctacctgcatcagagttgtttggtttcccgtggccagcagtcaccgacaagtcgacggcgagtcgccggcgtccaccatcaaaagggacatgcatgcagtgatgcaagaatgcatcgaagattcagaaattcaggatcagattgtttcttttcttcagactagtcacctacggtttactattgctcccagctagtatgaccgattaaaccgtgactacagagcaagcaagaataattctgtaggtaatattttacgtatgtatcatttgtggtttaaaagcctatatgaaaaaaatagaaaataataaaaatcttcaaaatcacctttaaatttaaattttggctaacgagagcggatgaaaaactcttcaagaactgcatcgtttcgccaaatactaataatacacaataatagtaatttataagtaaattttttatatatgtgttgttagcgattcaaatgtcattgttggaaaataaacttcgattaaaaaatcaactttaaaattagattttaaaaattaatttttggcattagctgatgcgaggagacgattacgactgcagaatcgctcaccttcttcttcttcttcttcatgggcagcgcgtacaaaatcggagctgattgcctgactatctctgtctccaccgagaacgacaaggtcgcgctccaatccagcgttgccaacatgggttgatgcgtcaggttggacgaatccccaaccccaacccatctggacactagactattttgtctccctctcaaccgtcgctttctccggcgacactccggccgccgccgcggcggcgctgcggttgagctccggccgccatcgtggggggagagcttccaaaaccgaaaccaatccaacggcccatatcagtccataacccaatccgttcaatcccagccgtccatccgtacaagccacgtcggttataaaccccaccacctcccactctcacctcttcgcctctctctctctctctcgcccaccaaatgccgaggcgaaaaatcacactatccaatcccaaaatcgatcgaagccgcaggttttaatccgagaaattgccccgaaaatccggtgatcctccgatccgtgcgagcgcgaaaaccctatgatgggggaggcggaggaggggctgatgcacaggaggattgagttccacgcggcgaggaggccgccgcgtgcggtggagggggcgggagggaggttttgggtggagatcctgagcccggatgccgataaggcggcggtggtggcggcggcgaggagcgaggggctggtcagggggttggagaagggggagggtagcgggggtgggatcgacccggagcttcgcgtcgcgaggatgtacttgcggagaattgtgagtgtgtaagcctgcaatttttcgtttcacattttgttgaatctaggtagcatagtatatacatgtagggtaggtggttttagttgttgcagttcagattattagaggggttttggtttacgaatagaatcagtaattataagatacattttatgaattttccttcagaaatgctggtttgttgttctgtaatgaaaaaaatatattcacgtttaactgtattatgttttgtttagaatacattttggaatagttatgcgcaaaaatttgcatccgcgtattgaaggtcctttttactggagtaatctgctcattcacctgaaacacgaggctttgcaagtgaatacttcactaaagatgccctattgccctatctatgtaaaacagggagctggcttgcaaaattttggcaatacctgctacctcaactcggttctgcaatgcttgacgtataccgagccgttcgtggcctacttgcagagtggggagcacatgtcctcatgtaagttcattgcgtctggtcgcgatcagcaattcagatactctgcatgatatgatgatgttgtcaatgaaagtcgagagtagtgaaccatcctttgttgctgtctgtgagcactctgcattttcttatcggatgttctatggtggtggttatcaaatatatttcctctctctataatcagtctcgaggcatctagagctagagctgcttcttatctatttggattgaacgaaacagatataaattttagtttacatgccttgaccaatgtactatgtctcatcacctgttctggagcaacctctgttttttgcggctgtatcatttctccagagaacaatataataacattttctgttttcttggcaagccctgtttctgtagttacttataatatcactttattattttttaaggtcggactatcggattctgtgctttatgtgctcttcaaagacatgtaaattctgctctacagtcaactgggaagatattgagacctgtgcacattgtcagaaatttaagatgtatcctttcatatgctattgcaaaataattgatccactttattttgaaataccgtatctatctataattttattcaacccttgtgcaatctttaactgcaaggtaggcatttctcgtagtttccgcatctcaaggcaggaagacgcacatgagctaatggttagcttgcttgagtccatgcacaaatgttgtttaccttctggtgtaccaagtgggtcgccaagtgcttatgagaagagcctagttcacagaatatttggtggtctcttaagaagtcaggtaaattgccaaatgcttaattaacttattactagtataatagcaagtaaaactttacccatatggccactggctgactatatctatatgcatgacaggtgagatgcacaacttgctcacactgttccaacaaatttgatcctttcctggatctcagccttgaaattgccaatgctgctactctggtaaaagcacttcaacactttactgcggaagagctactggatggtggggaaaagcagtacaactgcgagcactgcaggcagaaagtagtagccaagaagaggtttatgattgagaaggctccctctgtgttgacaattcatctaaagcgctttagtcctttcaaccctcgtcacaagatcgacaaaaaagtgcagtttcaaccaactttaaatttaaagccatatgtcagcaatcctgaggtatgtaatttttaatggtgttcttttttttttaacataagtttggacatgtttttaataagattctctttcatgctcatagtccttagtttatgtgtgtagggtatggagttcaaatacagcctttatggtgttttggttcatgctggttggaatacacagtcaggtcactattattgctttgttcggacttctagtggcatatggcacaatcttgatgataacaaggttattcttttttatgttgtgatgaatttattcttactgtttatcattgacacaacccttttttacattaatgcaagtcacatccttgtattgtgccatattgcttttttaaagttactcttttttttcttttgcctccatcaaccatgtcttgtcctgtgtaataacaaataccagccaaaatacaccatgttatatccaaaaacattcaatggtgaagtcgaccaactctatagtctatacttatgtccctcactctctgctcacaagagttcaccttgtaatatgtcttcttaaaatagtactagtactttatgaatgctagagaacttgttttgtcaggcaccttcttcgtgcactatattatgtagtggtctacagtcaacttaagggaggatatggggaatgtgttcactttgagggatggagggtaatccttttctttggcctgtttatgtgttcattttctgttggtgggattggtacaccaagttgtagttgagctgatcttatgttaattcagtactttctcatctgcactcctggcattctttattcagtttcttcctctctttttttttattttgaagtttgttttgttgatatacattaatacacccaggtttaccaagttcgtgaggcagatgtgctgaggcagaaagcatacatgctattttatgtgcgcgacagaacaaggagctcagtgatgtacagtgataattgtactgttaatttatcagtaaataaaatgatctccgagaagatcacatgtatgaatggttcaattaaaaaagatacagtggaaacgaaaacactgagagttccctcacttgtcaaagaagatgtgaacttgaagaaacagaactcagaaaatggtcaatctagcaatattagcaatgctccacaggaccagtgttcaaaaagtcatagcaacactgaagtgcttgaagctgcagcatccccaaacaatgacccagcttcaacacagaaagcttcttgcatacgtccagatacagctgctgttaacttgcccatgaaaacagagcaaacagctccagacaatcgaagggaaataacatctccagcacaagctgatgtttctgttcttcacaatgcaagtttcaatcagaagttgtatgagaagcagctacaggagcatcaactagaaactgatgatgcacttactgattccaggaaagatgcccctgctgccttgtgcacatatggtgttggggatggtttgttggggagaaatggccagtcttctgaacctcacataggtccatgccctgctgctcttcctatacacaatggtggtgaaggattgctgggggcaaatggccaggcatctgaagctcactcaggtccttgctcttctgcctttcctatacataatggtggcgaaggattgttgggggcaagtggccagtcttctgaacctcacacaggtccatgccctgctgctcttcctatacacgatggtggtcaaggattattggggccaaatggccaggcttctgaacctcacacagattcttgccctgctgcctttcctatacacagtggcggtgaaggactgttgggggcaaatggtcaggcttctgaacttcacacagatccttgccctgctgcctttcctatacacagtggcggtgaaggattgttgggggcaaatggtcaggcttctgaacctcacacagatccttgccctgctgcctttcctatacacagtgccggtgaaggattgttgggggcaaatggccaggattctgaacatcgaacaggtccaatccctgctgcctttcctgtatggaatggcactggtgtaatattggagaaatatggtcaggtttctgggccagcagatccattttgcaagccaactcctaccataagtgatacagtgtctattgcacaaatcatcccaactgaggtaactgtatgatgtttcctattgatctctctctctttttaatttttaaacacattattaatgttaattctgctgctcacatcacaatatggcagcatgctgctgtttctaatggaacagtatctagtagtgatgatttaactggcaatactgaagctaacgagtcatcagagtttgtaaagaattacggcgaacaagttatggtgagggatctttctgcagagacctctggtgatagagcaaatgcagatgagcaggtatttcctctctaccttttatgttgtttgcagatgtattttcatccatgctgtggtcccatattacaatggatataccatgtgttctctgctgttctatgcatgaaaacagaccttttattcgtattggtgcatgtaagtttatttgttaaaaactactttgcagacttcaatgcagaataacacactggaagttggtaaggatgttgcaaaggacactgataatgtggcaaatgccgaggagcaggtattgaaccaccccttggccgagcaggtaaaatctgagaagcaaatatatcctggaatttctacaacattgatttgctctgaagacacaacacagttgatagataaggatacaggcagtggcaaattaaataaaaagatgaattgcaagtcaaagaggcaagtgaagtatcctgctgttcgcatgttttttgggcccaaacaactgttactggcatcagtaaaactgcacaagaaaaggaaacacaagagatccaaaaaacaccatgcactttctgtgcacattgaaagcatcatcactgatcagcagacatcaacatcagaaactgttttctcaaagatcatatcacataaatcccgtggacagaaacgttcttgtgccagtgcaagttctgaggatggcactcagctgttcaacaagaaacagcatatcgaaggaaccaccaacagtgttcccatggacaacaacgatacaaaacttgctagcgctgacagcaacgatgcaaaacttgctagcgccgagctaccaagctcatgtacaaactctctggtgaaccagactgattcaagaaacaatgtaaatgcaaatgagagaggcccctggcattttaatctcctcacaaggggtttaagagaaattactggttaacatctcttcgcaagaaatttctcattttccatcctgctgtcaacactagaaatttataactcattgttttgtttttgcagtgccacgttgggatgacactgagattaaaaatacgaaggaaacagagatactacatccaaggactagaagcatcggctatgtgctagatgaatggtaagcctgttaactgcagttaaatttctttctgatggtgatgttggatgtctcaattctcttgatgctgaaattcggaaaatcctccacccataccaaatctttgctaaacttctgagtaatatacgaacaactggcaggaacataacactggttcctaggtccgacttgaactaattttagaatcctactagaatatgcaaccagcagcagattcttctttgctgtgactaagatctgagatgaatataaagccctcttctttttttgtatatatctcggttttcctcttgcctgtttgttatccttgaaactgtcttattcggaagataaacatgatccttaacaagatgcacctaatcgttgtgtcagggacgaggagtatgatcgcggcaagagaaagaagatcaggaaaccaaagcatggcttcagtgggccgaaccctttccaggagacggccaacatcagatcacggcagaggatgagactacagtctgaccagaccaaatctgggaaccagcctctcaggatataattgatatactggagcagcaacctgttgttgtatccttcagttttggaacagtaactacttctctagtagaactattatcctccccatgttttttttttcagttatgtgtagtgtcatcagagagtaagatttaggcctcatggctcagtcatttgtctgattgattagccgaggaacgaagcggactcttgtttgttgtcccatttctgtcgagcttatcatgccaatttttttttacgtcaatgcattcacacgtgttattcatcccggtccattcgcacaataaccgagcaattaaaagtcgtgatttctgatctgtgacttgtattctgcatcaacaaaattcagtaaaaactgcaaactttgccaaaccggtctgtgtagccattgtgaggctcagtaagcacgccatcacgaccgtcagatcgtgagcgaacggtgttgattgccaatttccggacttcccctgaaaacgcgggactcgcacccaaaatgcccaatattacgtacgtgtaatagttagcccgaaaatgattggaagaataatttgcgatccaatttattgcggtgaagagggtgaggcgcaccgagttaaggtggctcacgcgttcgctgtgatgacggttttactggcgcgaccgaccggaccggacccaacgcgcgcacccaactaccaaacgccggcgatctcttgcaggcaatccattatccatgcgaggctgcatctaccgcatcagtttggtcatcgatcttcagaaagatgtacaagtctgattcaatgcatatcaaaccagcaaagttaaaataagcttgacattcagaattccagatatacatactccaaatatctgaatgccgcatgcatctattgttaacctatgctagctgcaaattaagggtctatttagatcccctgctaaaattttataccccgtcacatcgaatatatagtattaaatataaacgaaaaaaataactaattatacagattgcgtgtaaattgtgagacgaatcttttaaacctaattgcgctatgatttgataatgtggtgctacagtaaacatttgctaatgacggattaattaggcttaataaatttgtctcgcggtttatatgcggattctgtaatttgttttgttattagactacgtttaatactttaaatgtgtatccgtatatccgatgtgacacgtcaaaactttacacccctaatctaaacacagcctaaaccaaaatgcagcacataaagcagtgatattcatatgaactgatcgagccaacggaattggaaattcgacgagaacttcattcacgatgacgaggaggttagctgggggttgtaaatgagacgaggtgcaccgtgcacgcgcttaacgagttaatggaaacctaccatccaaacccaaatgaaacgaatcacgaaactgggccacaaaatttctccaaattttgaattccagaggcgaccagtccggctcgaaatccccgccttataaattacgcacgccgacacgatacgcccccatcgaattcaggcgcaaaaacctccaaaacctttgcaatattcctcgtaaatcgtaattccccctcgcgatcgagctcgcgacgcccatggcgatggagagaaacgcggcgccgcgcgtctcggcctcgtcgtcggcggcggcgtcgccctccaccgtcggtgcgctcctctcgaaggcctcggtggctgccgctcccgcacgcgagatcccctcgccgcggtcgctgctgtcgcgcatcctccataggagtggcggcggcggcggcttcgggtgtcgccttcgcctcccccgatactgctccagcggcgcggccgccaaggaggacgccgccgccgagtacgtggaggttgaggttgaggcggaggctgcggcgccgaaggtggtgggccgccaagcggttgatcgcgagtcgcctcggagctcgctcggtacgtgtccatggcgagagcgagtgatcggatggcgtggtctggttcgattgatttggttgtccgtcgtgtgcagggaagaaggcggcggaggaggtgtcgccggcgagcctggggctgggcgcgagcctcatgctgctgctctccaagagcgcggcggagctgaacaggatggcggagctccgcgcccagatggagcggctggtgctcgacaccaagggggaggaggaggcgcggagcagcaaccaccccaacgcgtccgacgatcacgccgacatcaccaaggaggagcccaccgccttctccggcggcgcattatcccgctgctcacgcacggccgccgccccgggaaacgcagggcaccacgccgccgttccaatggaccagatggaagcggagctcgaggcggagctgacgctcctgcaatgcgcgactcctcgtcgggatcgtcaactcgaggtcgaacagctagaagcccaccgattcggatcaatttcgccgccattttctaacatttatttcctccaatccatcttcgcagatcggcgacgacgaggaggagtccacggacacccacgcggccaccttcgccgacgccgacgatgacacggacggtgctgacgacgaggaggaggaggaggaggagagcggggcggcggcgcagggcggcgtgtcggcgagggagctggagaggaggctgcacgagctgctccagtggcggcacgaggagcggatcgcggagctggagacggcgctggagcgcgccaggaagaggctgcaggagaaggagcgcgaggtttgctggtggcgcaacaccgccaagctcgtcacccgccacaaggacgactcccgcctcagatagcaagaattaatccgccatgagatgagatcaaacaagaacaagatcaagatcgatcatctcgcctcgcagtgatccgttttgtactctggtgatcatgctgcaactagactagaagaacaaattccaaccagaaaacattgattgcataaactaactgggatcacagattcacaggattcggttgctgcagcctatcaacatttggagcagatggtaaggtgttttttacctatctagtctacggattgattccaagatgattgtgtttcggcctttcattcgacctccaaacgtgactaaattaagatgcatggaatgacgcacaatctcttactaatttatactgttcggttcggttcggttcaatcaccatcgccgcgcgtaaatcgaattattcctactctacctgggccagcaaatcaggcctctcttggctcatcactttgatatatcatatcacaaaattcaataaaataaaataaaatgaattgaactacaccaccatcggctatgcaaaacctgcagaccatgcaacgtttccaaaattatgtggctaaattcctgtagaaacataataaactagctgtattctgcacaagtcaaatttgcatcagttgcggactttgccaagcaagacttgcttgccttcttgtcaaagatccgtctctcacaaggtaagagcaaagaaacctgatttctttttgacttttgagattcctcatccagattatctcaattgccgctagaatatgcaaaacaacttaatttgatagggcgatacaaaacatctgtgctgttcttttcttatattatatcatcaataaatatacagtgggataacattcacataacacggcagaggcaacaaggaaccagtacttccgagaagtttcgtctccgtggtgcctcagggcttaagaggtggccatcttgactcaaagaggtctccgcccgtggcagacacaagaaacatatacaacttgaaagtatttattctgtgtcgcagcaaacctcaaatacacaccagttaccattcattctggagcaactcccttccatatgcatcacagagactactggagctgatcctcgttatggatagtacatatatcctgtgagtgtgctcttcaaagaaccgtgcatatcacttgtcatccagttgtttttgtagaaagtcgagaaccgagagacgctgcaaaagtagcacagtacatgataaaagtcagtcaagagcaccacaaataggagcgcatggatgaaaggcagtacacaaggataagtagtagctacccgctgctcaagactggcctctccagattccagcttcaaattctcaaggcatttaattgcttcctcaaaaccctcaactgccatgctttcgttcccaagatttctatcgacatccgcaactttggcaagagaagttgctacatcaatgacctatatccaaaagtagacagatcatgaaatagcggcagctaaaggaaaaacactcaagaatatgtctgttccatgtagcagctaaatcctaccacaatcttacaaaatgatttgtgatcttctgttggttcatctcctgacattaaatttagataagataaagggcttgtttggtctgcaaccaatttgtgctgtacaaatttctgtaaagttgctcatttgatttgttgccaatattttttttgtgtacgcgctttaattggttttcgttaccaaaattttgtcagtgccaattttttggccacagaccaagtaatgaaataaagccatcatctcaatggtattgacaattttattggcatggttgaattgggaacaagcataaatataggttaaaagatctgttagccatcatttatggcaaattgccaaacttcctagtatggtctggcacttgctaccagacttcagacaacaatttgcttcagagaaaggaatacaaaaattctgtgtaggaacccctttttttacatccatttttttctgcctactatgtattatgtgcaatgtccatcagtaccaggaccatgaattatgggataaaatagctactggtccatgtgtaattggagcactcattgatatggtatctaatacacatttaaacacttaacatttctaattatgtctggataataaaaatctaagataaggaagaacttttgatcaatatctgttgatatcattttcatggacatatggtactctactagtgtaatgatatagaagagctagcacaaaagagcagggacaaaagagagtgatgaataaggttccttctgtttctaagatgataacagcagcccattttgtatttatagctaatcttaatcagtaatacagtaatcacctgggaagccacagctgagtgttcttttactgcacttctgcgaacgtccaacgaacgcgcataatagcttcttgctgagtggaggtccccatcataatagcaaagatctccaattttatttagtgaaactgagagagtatggaccaactgtagatgaatgcaaaagttaaattaacatgagaacttactatcatgctattatgatcatattaacaacaaaacacaacctccagatcctttttgggcaatttcgagaggaattcagcactttcttcatagtaagtgattgctgaaggagcatctcccaaggtccgactgtggcatggaatgaggtcaattatgaacaaacaaagaaaaaataagttaaatactgccatgattatgtgtcacaaatataatgaaaaataatagagcacaatgaaattcatggaaaaagttcagccagatattataacagagggatgaaaacaaaacaccctccagtgacatggaaacacaatgagttcagcaacaacttatgacagaccctaaggcttttatatgagaaggtaccagacatcctgactagaactaggctcttggtagctggtagttggctattacacaagctatcagcttgctattggcatcagtatgctggctggtgtagggcatggttaaaggtttcccacgttttccgagctgtgaatatactattcagacaaattgcgaccagtcataattggcatcactatcagcccacaacctgctagacaacctctgtggtctgtgcatcagtattgtagaacacactgaggcacataacagtttaatattttaatggataacaaacgttattacaacaagattctcctttcccttgtttggaaggcaagttctatgcctggtcgaaacatagaaaattcaggtattagaacacatgaaagataactaggttctgaatgagcagaaagatgaacgggccaaggctagaatgggcccttgtgcacaacagatacaaatcattgagcattgagcatctctcttcttttgaggaaagctacagacatttcaaagttaagaactgttctctcaattagaaggaaaaaaaacatgcaagaatttagctcaatactcccttcgtttttaaatgactgatagcaggcacgattcacttttgaactttgaccactcgtctttttgttatatatttacaaacacaagaaatgatgccatgttattaaagtgtgttatgtcctaaatattaagaatcaaacttttgttccattaggtctaacaacttaagagcaaataatggtcaaagtttaaatgggaaagtcaaacgtgtcaattatttagacacggagggagtaggcaataaacgtatcaatagcaggttcacatatcctcaagtccccaagagaaaattgccgtaccagcagtccccaagcattcctaacacagctccaagttgagaacacagttcttggttgtcttctttagatttcaactcttccctgatgtcttctgcacacatactgagccttgactttgcactttcaatgttctgtgcgcgaaaagcctggatatgtaaaagtcagaggtattgttaaaatatatagagcattaataaattaatacagaccagaggatgaaggatatatgcaaatttcaaaggtaaaagaagctcagagtaagaagcttatgggagttgatttggtaactgaccctcatcgcttgctggaccagaaaagctcctctctccatggagacatgctcgtaaatgaccttggtcttgtcacttgcggcttcaccatcgcctgcagcatgtgatctcttgattcgggcatggccatcaatgaagcggtcgacaaggccttgaagctcatcatcaggctcgatcccttggatgtcagcaccacacaatggacagtccttaaagcgcaatatgcatgccctgagaaggaaatccagtgttttggagaaagacaaggagatcaagtgagaaggtacatatattgacagaacgaattagaaagctattgaaatatgatacgcacttgcagaacttgtgcgagcacggggtgcatttgctgctttgatgtagcagagcgtggcagaccacgcagctgagtgggccaagcttgaaggtgttgttggagtcatagccaaaggggcactttgctggcaccacacgaggatcggtgttagcattgccagttttttcattatcgtcgtcgtcggtgtgattgttggctgtgacaggacatgaggtggttttgttgtctgattttacggggcatgtggcgccagcagaggcgagtttggcaaacgggcatagagagctcataatcggttggtcttaggtggattattatttacctgcataaaagattggtggcaagcagttgagtgaaagcatgagactagatgcagtagtagaattgaattgaattgagaagaatgagagagattgttaaagtagggagctaagcagaagcttgattattagatagaggttgggaaaaaaattggggttggtttattttgtaagaacaatttatctatcaatctctatctatatctatctataactaaatctatatcatcccaaaataaatccagcacatgagacaatccaatcggaaattgcaaatcacaaaataaatcacacataagatgagagaagaggtggaaatcacaaaataaaatcacatcacgtaggagatgagaggagaggtcgccggaccttatcctcgccgctgtggaggtcccgagctcggagccgaatcccgagccgcggcgccgccgggcagccgctgcgccagggagccactgagcagcctctgcgctgggagccgttgacccgcccctgcgccgctgctgcctcgggagatgccgagagggagagggagagggaggaggaaggcggagacgacgagaccgaggaggcacggccacgtgaagggggccggtggcagcaggcggatgcgggccggcagaggtaggggaggtgggcgtgcggcggcgctgggggtggggcgacgctggggtgggtgggagtggggcggcgctgtggaggcgtgcggcggcgctgggtgggtggaggaggaggaggggcggtagtgtggataaggttggatggctgtgagctgtgggaatcaggttggttttcaaaaaattaacacaaaatttaaaactttcgattaggattttcaaactttcaacccaaatttttgaagctttcaagttaaaattgaaaactttcaactcaaaatctaaaatctttcaactttcaccagaactcagccgcctctacgccctcgagcctttcctgacgccggatctgccgctcgcgcgcctcggcgaccgtagctattgcggggccatcatcgagaggtcgccggacccgcccctcccgtcgccgttgacggtggatccgtgcgagagtgaggcggagagacgacaggatccaggcggcggcggcggatccacgcaagtagcaaagacggcttaagccggtgttcgatatggtcaacgacaactcggatggaggagggagacagacgaagaaagactggatcaccgccgtccactctcttgcgtcgctggaggttggatcggggagagtaggagagaaaggggattttatcggagatcaaggttttcggaccctgccccctctggccggcgatttcatcggcgcgggaccgatccgagccatccatcagatctgatggctcagatcagccctgggtcaggccgccaccgctgttgggccacgtagtctttgggccgcggatgacaactgggccgtgctcagttcaccccgcgatgggccgttgccgataaatggccaactcgatgcgcgatcaactcgtgcgcttgcgctaaacgggccggccaattttttaggccggttagtcatgtacataattttctttggcattattttgagccatttaaaattgttggaaaattatgatcaattacttagaaaatatatatctatatctatatatacctaataaaaaaatgcaaagcttctggtttattttggtcagttggtttttttcccaacgctgccggggctgaatcctagcacaaccccgccgccatgtcgatcgtgcgtttcctcctccaattgattgcaaaaattgatgccccactccttcatcatcagtgaccttcctggtcttttttatcgtgaattttacgttttgatttgagaaaaacggaaagagtagatcgagtggattgaaagccctcatctaattttgggagatcaggaaagattcggccagatttgtggggaagatctgctctggcatcgtatgggcacgagactctcttcggacgttgaagacggagtcgactgtgggagcaaggcctgtggctccacttggggactgggctgaagggaggcaggttgagttgagggagttagcatactagcctagggcctaataggaaggaaggaatgggctttcggtccaaaaccaagaaaatttttttattaacttttaaattatagtatatagcaatcccaatattagaattttcattaacgttttcaatcgtaatgtatagcgagagagataagcctatctgaccaggcaaccgatacttttttaaaaaatacaattatagtagaaaaataattgttaaggtacacgtacatactttacagacgagtgatatttttaattattttttaatttttgacatcataatcatcgaaacttttactttaatatttgtttgagataaaaatttccatgaaacacgacatattaaagtatgcgcgctatatatcatccacatgtcaccactacgagactatgtgtaaatatgcaaaagtatttttgatcgatcgtggttttcattagttttataataaacttacctgttttaaatacaaattttttaatcatacaaatttttgtccatctactcttgcgtgaaagtgacctaaagaattcaccatttgttcctcccatgatacaatcattacgctaacacgttaggaatgtagttgatatcatacacatacatgtggaataattgtccaaacaaaaagaaaacctttgtgattaaaaaaatccttcaattaaactttatccaatgcgacattacccggtgcaacacacgggcattttgctagtaactaatataaatattcgtatttttccggtcgtcacatctaaattttcgtccgtttttcgtccatacccaatctgattcggttagcaatagccatggaaaaaaattgcaaaaaaaaaatctgcggccgtcgacgcccgcctccacgccgtccgggctgccacccctcccgctccgccgggaccaccgccgccgcccctcccctcccctcgatctagcggaggggagggcgtcgccggctctcccgccgctgccacacacagtgaaaggggaaaagtggagagagtgggggggatgggagggcgtcgcgctggggggagggtgccgccaccgccgccgctcgttgggggggagggcgcaccgccgctgctgccgctgctcgatacgggggaggcgtcgccgccgccgctcgcggggggagggcgccgccaccgctcgccgtgggggaagggcagcgttgccgccgccgccgctcgccgtgggggaaggtggcgccaccgccacaccccgccgcaccctgccgtcgtcgcgccgtgccggcgagaagggagggacagcgccggtggtgggagagacgacgctagtggcgggagagtcggccggctggggggaggggaagaggcgccggtggggagagggagagggggagggggagaggcggcgtcgggggtaggggaggaagaggcggcgtcaggggcgggggaggaggaggcggctggctcggctggggggagggtgagggggagggttagggttagggttttcatcaattttaaacttatctgagccgtctatcaaaacgaacggctgagatcgatcgtgggtttgggccgcaccacttgggctgcacgtgggccggcggtccactaagtgagaggaggagtatgggggtattaagtagactttggtctcttgcaggctgaagaagaaaatgggctgaaaaaggcccatagagaaaaaaaggatttttatttagatttttatttcaataaattctgaaatgatatttgtattatcaaaattagcaattaagctatgtaaattccaagaaaatttcaatgagtgtaattaatatagaaaatttaataaaagttaaatccaaccataacattttatttcttacacttactttacttataaattaatttaattatatacctacctacttaaaaaatacccaaatatttcagaaaatttgtatttcatttaattataatttaatatgttttaattcaattttatctgtttttttcttttcgttgcaacgcaataccacttttgctcagaaaattttatatttcattaaattacaattcatttttttcatataaatagttcaaatcaaatttcattaaccatatcattaccctgtggaacgcacgggcattttgctagtaagattataatatagtaatagggaagagaattaaatcgcatgaacgattcatcctcgatacatgaaaccctagaaatcgtatgatgggggatgggggagtaatcaatacttacgtacgtaggaggaggagagaatgaaggaagggggcaggcggcggcgagaggggcgccggagtcggcgggaatctgggtgtgcgccgagagggagaagagagattgtgagcggagcggatgagagaggggatcgattgattgccaaccgcaagctacaagctaagaagacgggaggaggaggaagacgcgacgcaacgcaaacgaatcgaggagtaggcccaccagaccagaagcttacaatggagtatgttgggccgatagcccatttgcattttggcaacgcattccatgcattaatggtggtagtccccaccacaagtcagtctgggactgtccaccaccgcttttatgactcctgtatcactttgatgtaattatcttgatatcaatagaactccttttatatctctagaaagaaaaacatttgcatcaacatcattattattagagattaactatatctaattaatattctacattacaaagcaacaactattctctcaattgggacattggcccggtccaccgaagaacacatgcatacccatcttgagaacaccaaaaccatcaacagtgtagcacaatcccctagtggtcactgtagtggccttaccaacgtttggattgacaaagttgttgtccttgttggctatcctgatacccttcacaagtgcggctttcctatacccctctttggcgaaatggccgctccccattggtggaggatctaatgaaacagttggtccacgaacccatccaccccaaaatgcatatgtagccttctcttgtagggtgtcaaagagcttactcggccaatatccaagtggtcgatatccaatggcactgctcttgtctaggcgtgctagccaccaatctttagtctttcggtcctaattatataattaacaaaagaaaaaaaatttatatgagtacccttagaccggtttattacaagaaactattctaaactcttgaagggttgtcccctagttgtttgcatgtcactcaaatggttatagaaaaattcaacaagatagtttaatatgtgatagatcactacacaaacatgtaagatcaaatttaacttctacatattgcagcagaaaaacaaatttaactagaatatacgttaactagttgtagtttaattgacttatataagttaaattttaacttacatgtttgtaaagtgatatatcatatgttaatacattttctcaaaaattttcaatgtttttcataactatttgagtgatatacaaataacgaggggacgtccccttgagagtttaaaatccactctcgtttattgccttttgtaaaatcacactatgtagtcacaaaagtaaataatcatgtagaattattaaccacaaggaaaatacctgaaacagcatgacggtaattatatactgaggcccattgtagatagaaaccggtgttattttccctccaataccagcaagttggctaacttgcacaaaaccaggacaattaaaatcatagcatggcttatttgaactgtctacctatcgccaaaagtaatgccaaggatgtaagttggatggattttgtggtggtggctgtagagctattactaatattcgtttttatagccacgtcaagtaaggaaaacatatagaaaagtatgtgtgtattacccaacgaatgtgaaacctgacaaagttgtccccactaaaacttggccatacctgaaaaatatgatgatgaaaaccaacaattatatagtacatgaatgcataattattgtttaagtttgcaatactatagatgtgacaaaattattactaataactaagctagagggaatacatatgattaagcagaaattcttagacaaaagaatttatgcttaatcatgatataaataaacaatgatataactcatgattaatcacaatataatggaaccgtgataatttcaagtgttgaaaataatagcacggtatgcaatgggactatatacttacaatggaacctgcagctatctcttcgggtccattattaagttgtacaaatgatgcaatgtggtccccattatttcgtgttcaaaacggctggttaacacttagggtagcgtgtgttccatagaaactattatcgtcccagtatttgatacctgcatactacaagtgaaagaataatattgaaggtaagtcaaatagctttgcatgccacattagaatagaaaagaatttaatgaagataaactatttttatatacaatctataattgacaataagataactaaaaaaatgttaaagggtatacctcttcttgtgaaccaccattaggcatatgtgcttctgagctattgtgacgcagtatcggaattgttccggttgggcacttgatgtcggggaaatttgattctgagatattggatgacagaatagattgtatatcaagatctaatggataagagcttggttccatctgcgtaacaacaaaaatgaatcctaatcaaagatcgaaaacaaataccaaaaaatacacttatctttatattggacggtaaagggaataaatacgggaatccctcagttgatggctttcccaatatttcatattaaagtatcatgatgatatcttatataatctactaatggatcctaaataaattaaacttggatcttgaaactgctgttctattcatacaaaacacaaaacttaatcaagcataatatttatgtaacatgctcaaaagcatattcttctatacgaaaagtaatactctacctggattatatggtttttcaataatggatggttcatagcaggttgtttgtatatgtcaacacaatcgtaaacatcaccatctcctgtcttttgaacaattagttccttgttagccaccaaatgcaatgcaaatacagaagagaaggatttattaatcacatacctgaattgtcatgtttagatctttactaggtatggttgaaccaattatcccatctcgatcaatatgtatcttcactcctcctactagaacaagatatgtcaggcatagagttacaatactgatagctagattttcttccattgttgagtctcaagaggtcatctgttctgtatgcaaatggaccattttatagcttgaggaaacaatttatcttcacaaggccaatgaaacatttattcattgctgaatgagaattcaatgaatttgcaattaatattgagggtgtaaggacatgccacaataatgaagtaatcttcaagattatttacactattaattgaagatatctttacagattttgtaatcctctttttaatgcattgtgggaaaaataatataggaaaggcataaatgataaatgtggcattaaatgcacaagatttggtatactagacaaccgtacgatgtaaatttattgtagtaagaacaaatttaatagtatagccaactgctacctataacaattgatgcatcatctatagctaatctagcgatatacccatgcaatagttagctatagatatatgctaacaccattaagcatcaatacatggcttgcctaatcccctcacaaaatttgttggagcccgtgttgtagttggctactgatttatagtccacttaacttctctctactctcctctatcctccaactcatcacaaatatggtgtagcatttcctatagcctacttacatcatcttattgcatttacactaatttttggaagaactttaaaatatttaatgtaagaaatattaattacatgatatatgataataatactagattacatcgggtggacattaatttaatgttttaatgtttcttcaaaatatttaaagcatgctgattgtcattgtgatgcagtaaatccttttccatatactagtatgatttattttgttaatttcatgtttctaaagtgacatatataatgtagcagcaatgctaattagcgagcattctctagcaaaggaactagtgaaaactacatccacatatgacatatgtgctctctcactaacgttgatatgactcatatctcctatagtgggatatcttaatggctatcctttgatacctcggcctcctcctcgctagtgatccccacacttgatcctagtgacgccgatgaggtcccatgtcttcatcagatttggaggcaggttatcggtagaaacttccatgaattcgagtagaaagtttgaagtcatgcgtagaaagatttgaatttttttttgacttaaaccactgcaggtccccacaattaatatattagaaagaacgaaagtttcttacaaaccaaaacaaaaaaaaaataaagtgtcttaaaaagttctgaatattttacttgaaattttcaaagttggaaaaatattggttgaaagtttttgagattttagttggaagtttcagactttgattcaaaagtttagggattctggtataaaatttttgagaatgttttaattggaagtttccacttttgatttgaatgtttagggattttggtatataaaaaaagagattttagttggaagttttagactttcaattgaaagtttgtgtttcgaactagaagtttcgggatacaagtagaagatctcatatttgaatcgtaaagtgttgttgttcaatttgaaagtttcaacaacgcaagtagaaagttttagaaattctagattgaagtttgagaatttgattaactcccacagcttgctctagcctcttgtatagaaatagggaaaggaaaacaccccgtgttggaaaaggaaatgggcacaagtgttgagattcggagtatgactctaacctagatacttcaagtcaggacacgcgaatcgtgtgaaagttactgctgagttgaaaccattcacgacctcgtcatcttgcatgtgagtgcaaattagcaatccacataaggtactaccttgtagtacaatgcaaatttgatgatttgtcactctttgtattgccaactgccaccctgtgagaatgatacatgggactcttcgtgccaatgatgagtgggctaggatggcaaattatctaatttatctaaagagttgtaaatcatcaaatctgttgcaatacaactatttattggtgcttcaaaggttgaaatgtgcgtaagaacatatccgtggcacgcaatatatctcgaggtcccgctagaatgcgtttagggaaataacgagtttcgaaagaatgaatgaagctcacttgcttcttaaaaattaaaaaactcatgattggttgcttccaaaaattaaaaaaaacagtgagcgaatggctaccatgtgggccatgcctcaggtgaactattctacaccatgtcactgtcactttttttgctccgcaatgaggttaggttggatcctagtgtgggccaaacgaaacaaacttgtacttgtcgcgtaggcagtgggcatgcatcatgtgggcctcatgggctggtggcctaagtagtgcatgtgaccgtgggtagttgcagtggacgcaagaggagcgcgtgcgtcacgccacccgtgggacctcactggtaggccgacaccactctatgccacctcgatcggacaccaccaactactcaaatggtccaagctttgctccggcaagcccacttgttagtccttggatatgggagctagctactgactggctggtcaaaggagcctccgctcaaaactccagccccctccaacacacaacattaatttgcttctttttgggacaatgaatatctcatcagtctaactatcataggagcccgaatctgattattaaaaaggaaatagagggtgcatgcatgcatgcatacatggtgttatgttgttgtatgttccctttaattccattatttctaacacataaacttatgttattacaatttgcaaagcacatcacatcatttagatgtacttgcctgggccaccatagtatacatgcataccatcgtcattaagtccataaccatcatagctatatagttttagattattagaaaaaggattggcattacggatgtttggagtaacaagcttgttatccttgtcttcaataacttgaatattcctaataaaagcggctttgccaaatccttcagaagcaaaatgcccacttcccatatggcgtgcaccatttaatttatcttatcttaatggcgttacaatagaaaagttcaagaaattctctttacatgcatcggcataaattatttggctatgagatggtagaaaaaagattccaacttatcatgaatagctcaactaatatcattgtgagctgaacaaaaagaatatagcaaaaatacttgcacataaactacatgcttagacatggaacctatatgaccaatcatacaaatattaagaatataatattaccttaaaaataagaacatttattacatattgtggtccattatagacagatatgggattgattcttcctccaagaccaacactgtgactaacttgcatgaaaccagggcaattgtgatcactgcaactcttgttcaattcttcattatcctattattagaatttattccaaagtcagcaaggaactgtaacaaattatatttgtaatatccgggttatcaaatttatatggtccatcatagatggttactgaagaaaatgtttatgtctcacccaacgaatatggaacctagcaaagctatcaccacttcttggatatacacaagacccagcacctataccaattccgttggtaccttttgggacaacactaatttgtatccatgatgcactaacatctttgctatctttcttcacacttggttcatagacatttattgatgcctgcatgccatatatctcatcccaatattcaattcctgctccctacaagcaaaaattatgatgccttgttgggataaaaagactaacataaatactacgaagatcagctgatcgagttgaaaatttccattgccatatccaatgcaaggataacaatgtggggtctaggttggcagttatcctcacattggatatcattttccaatttgtgcatgctcaagtgttattgggcagatttcccaaatcaaagtatatatataattctaatggcatattacacagaaatttcaatcttctagtgttgtcaaataggaccaacactaatacatttcccccgataagtattagtaattggatacaacaaacatatttcaaatctccctttggttttattgaaaaaaaaagtaaagcttcagaattaaaataagttacttatttcttaaaattgcatttgatctctgaatttctatttttttatatataattgctcataagatgggaacattgcacatatttcatcttatattatgtctcgttgagaattttgatgttagcactcaaagattgagtcgaaaatgatcatacttcgtaaatatgcaacaactattcatgaggcaataccatacaatagtctataatatcataaccaaccttttattactatataatttcaaaattttattaaaaaacctaccagcattggtaaatcatcattagccagtgtgccaatacgttgtaccatcatgttggccaaattgttgttgcgcactattggaattgttccaatggggcaatcaatggtagacaattgtgcttgcgagattgcacctactaatggcgatttgatatccatccctatcgggaaagaactaggttccatctatttgtcatgaaaaaacttgatcaccgtattcattaaaaaaaacttgatcaccgtataataaatgactcccaacgcacaaccaattaaatagatatacacatagaaaaatatgcacacatgatttgaagtgcagttttcacatgtgtagacgatgaacaatagatacaaaaagaagttattgttcttaatgttaaatcaaagtgtagagagtggataaagaacgatttttaaaaacaaatgtagaagcaagctatgacctatcatgaatacaaactaatgtaaagaatct
